United States Patent Application Publication US 2003/0180953 A1 - sequence listing, part 2

SEQ ID NO: 7850 - protein, 1551 aa, Candida albicans
MSIEKVPILGKETIHVGYGIADHIVREVIANLASSTYVIVTDTNMARTPQYSKLTDDFKTNLSEKRPESRLLTYCVSPGENNKNRATKAAVEDFLLQQGCTRDTVILAVGGGVIGDMIGFVAATFMRGVRVVQVPTTLLAMVDSSVGGKTAIDTPLGKNFIGAFHQPEYVFCDVSFLETLPARQFINGMAEVVKTAAIWNEEEFTRLENFSKKFLSVVTSKKPDLQSIKAELVKTVLESVRVKAGVVSSDEKEAGLRNLLNFGHTIGHAIEAVLTPEALHGECVSIGMIKEAELSRYLGILPPVAVARLSKCLVAYGLPVSIDDKEFLKKVGPKRHYVEIDILLKKMAIDKKNDGSKIRCVLLEKIGKCYQLKAHQVSKQDLSFVLTDEVLVHPFTNPPKENIIVPPGSKSISNRALILAALGNGTVRVKNLLHSDDTKHMLDAVASLKGAEISTEDNGETIVVKGNGGNLVTSGEELYLGNAGTASRFLTTVASLVGKSQASDDVILTGNARMQERPIGPLVDALGSNGSEIEYLNKQGSLPLKISAGNGLKGGRIELAATISSQYVSSILMCAPYAKEPVTLALVGGKPISQLYIDMTCAMMKSFGIEVTKSTTEEYTYHIPKGTYKNPSEYVIESDASSATYPLAFAAMTGTSCTIPNIGSSSLQGDAKFAVDVLKPMGCKVEQTTTSTTVTGPPRGHLKPLPHVDMEPMTDAFLTASVVAAVAKGGSSTSITGIANQRVKECNRIEAMVTELAKFGVPANELPDGIEIHGIDIEDLKTPEISKRGVSSYDDHRVGMSFSLLAGLCKEPVLILERSTTGKTWPGWWDILHSKFKIELDGYEPPFNTDKHVDKSSDKSIIVIGMRGTGKSTLSEWLASFLGFKMLDMDKYLEEKLGTGIKSLIKAKGWEYFRQEEAIVAKECFTKFSKGYVLSTGGGIVEGEDARQQLKSYADNGGIVLHLHRDLDETVTFLAADTTRPAYSSEVQEVWLRREKWYHECSNYHFYSSHCSTEDEFNHLRRSFVNYIKLITGAERPVVPVGRSAAVVLTSPDLNEVVRDLESITIGADAVELRVDLFKDTSAEFVAAQIAVIRKHADLPIIYTVRTMSQGGKFPDENVDELKSLLLLGIRLGVAYVDLQLTAPNELIEEISSKKGFTRVIGTYQDINGELKWNNVEWKNKYNQGVSMNADIVRLVGKANSIQDNLDLENFKKQNTLKPLIAFNLGSQGKLSQVLNGTFTPISHKLLPNDEEFLTIGELNQTYFDIGGFTAKKFWVIGSPIEHSRSPNLHNAGYKALNLPYQFGRFEATDVDVVYDNLINKPDFGGLAITMPLKLDIMKFATKLSDAAETIGAVNTLIPIEGGYFGDNTDWVGISNSFIRAGVPPKSSSNGLVVGAGGTSRAAIYALHQMGCAKIYLVNRTAAKLEELVKSFPKDYNLEIVETEQQADKASKVSLAVSCIPADKPLDGEVLKKIERILSNGSEQSAGFKPTLLEASYKPRVTPIMKLAEEQYKWKVIPGVEMLVNQGDRQFKLHTGFTAPYEIIHRAVVEE

SEQ ID NO: 7851 - protein, 548 aa, Candida albicans
MSSFSPDIKKTIEVEVDASSFHSDSVDFTKDDIQDAESIFHNEKQLSEGLNTRLIGMISLVGVFGTGLFLSSGGTLATAGPVGMILAFVLVGIVVAANQISTLEVACLMPVTGSNIRHVEHFVDKSFGFALGYVNVYSAIIPSELAATSVVVSYWTDINPAVFITIFGVVIIAVNSYKVKWYGEVEFFFGFLKVLLILGLVIVGLVIDLGGAPNHDRLGFRYWKDPGPFAERFVTGSTGKFLAFWKCVSSVVYSFGGVNSVPLLAGETKNPRSSIYRASKRILVRVLILYFLAVFILSLIVPYNDKSIASPTGNAAGSAWVIAVQRSGIKVLPHIINAVVLTSALSAANLGLIHASRSLFGLASNGQAPKIFLKTNKHGLPWVGVVFAALFLPLSYLSVSSGTSQVFSWFQSITSSNLLVNWSVFALDHIALHRALEAQGYSRENLPYKIPGGQYAGPVSLFFSLLFLFTGGFAVFIKGQWKFANFFSSYFVIPLFFGLYIFSKLFFKTKYVKPTEVKLKPLFYDVIDRPEPPIKKLKGWEKISLLWG

SEQ ID NO: 7852 - protein, 501 aa, Candida albicans
MSNSVSEAESRGHKSLEIEEYQIEEYQIDNHTNDESSEILDPHQLNKVYRKLDLRIIPALWCLYFLTSFGSNCYGLTLTMNRAEGHSLAQQLHLTSKDTSTASALYYVGYIIFDVPMNLIMTKVSPQTWLARIVITVGLVYTCYHVLHNAGGVIAVRFISGVVGAGTWPGLSYYVSLWYPNDRSTRRIGYYFTAAQISAAVAGLVSAGFQKMDGVHGYTGWQWMYLVYGVITMTVGIALLWWLPDRPFIGVKSESNRLVEFYRKFTTPPHPLNEQEKELHRKDLEHRYKLLKWTWKDVVNIITDLRIWPLIIMYFGVVGTGFGLAVFGSTIIATNNPNLTSIQVSLLYAPIWLFDLGGILIITPFADRFKKFRALIFSGACVIIIVGMIVTTFAHGSWNKYGGLLIAGFGLGPTVPICMSWSAEIFQKRYGDVGNAVSAALVSGLGNLGSVTSTYALYSGWPEDKARLYRNSNMMLVLMLGVSIIASGVCQLIKDKVRQPK

SEQ ID NO: 7853 - protein, 218 aa, Candida albicans
MASYKSSFLQLALDSQALKFGKFTLKSGRESPYFFNLGLFNTGKLLSNLATSYAEAIIASGLKFDILFGPAYKGIPLAAITVAKLAELDPINYGDIGYSFNRKEKKDHGEGGSIVGCSLKDKKILIIDDVITAGTAINEAFEIIGNEKGQVVGCIIALDRQETTATDPTKSATQAVSERYQIPVLSIVNLGEVISILNGKINDEDLKSIEQYRSKYGA

SEQ ID NO: 7854 - protein, 208 aa, Candida albicans
MFSPISLCRSTLRTPSVISTINSRSLSGITKFDTRKFVQTLQDKGGFSEKQAEVAVNVVNAAINDGIYSITNNLVKKESLSSIAYQQKVNFAKLKGELQTMDKSEFTSLKKEQEKLRTDLTNLKNRLKEEITKNQASVRLDLNLEKGRIREESSQHELRIEDTYSRIDEEVSNMKMQIKTVKTQVLQWLMGVSTGTLALLLTFVRFYF

SEQ ID NO: 7855 - protein, 754 aa, Candida albicans
MKVNLKLIIGSILISQAQAIWPFDSSGSSSSSDSSPSETGSSGGTFPFDLFGSGSSLTQSSSAQASSTKSTSDSASSTDSSLFSSSNSGSSWYQTFLDGDSGDQKTDYAPFNLTCPSKKTFIRTASELSQQEKDYIHKRQETTNKNLIDFLSKRANLSDFDAKSFINDNAPNHNITIGLSFSGGGYRAMLAGAGQILGLDGRYEDANKHGLGGLLDSSTYVVGLSGGNWLVGSLALNDWLSVGDIVNGKSTIWQLQDSILNPSGMRIDKTIAYYYGLAQAVQAKEDAGFQTSVTDTWGRALSYQFFEEDDSGTGGANITWSSIRNLSSFQDHSMPYPIVVANGRTPGTYIINENSTIFEISPYELGSWDPSLKSFSDIQYLGSSVNNGNPNNTDICVNNFDNAGFIMGTSSSLFNQILLQLDNYSINSIIKMILEKVLTDVSDEEYDIAVYEPNPFFGADSAGIKSITTNDTLYLCDGGEDLQNVPFYPLIQNERGVDVIFAFDNSADTNSSWPNGTSIQETYKRQFSKQGKGTPFPFAPDYKTFLDKNMGDKPVFFGCNSSDLEDLVAWHENDKINVTDVPLVVYTSNTRMSYNSNFSTFKLSYSDQEKFGAIRNGFETVTRNNLTDDENWSTCVGCAIIRRQQERLGEEQSDECKKCFQEYCWTGGFKDAASVSSVSGISGLAAKTHTSGGTSSTTQQTSTTTGSSSNGGSSSTGSSSSSKKKNGGDLVNGGVPSSIFLVFNSLLGLIIAYL

SEQ ID NO: 7856 - protein, 567 aa, Candida albicans
MSEITLGRFFFERLHQLKVDTVFGLPGDFNLALLDKIYEVEGMRWAGNANELNAGYAADGYARVNPNGLSALVSTFGVGELSLTNAIAGSYSEHVGVINLVGVPSSSAQAKQLLLHHTLGNGDFTVFHRMFKNISQTSAFIADINSAPAEIDRCIRDAYVYQRPVYIGLPSNLVDMKVPKSLLDKKIDLSLHPNDPESQTEVIETVEKLISEASNPVILVDACAIRHNCKPEVAKLIEETQFPVFTTPMGKSSVDESNPRFGGVYVGSLSKPEVKESVESADLILSIGALLSDFNTGSFSYGYKTRNIVEFHSDYTKIRQATFPGVQMKEALQKLLTTVKKSINPNYTPVPVPETKLINTPAAPSTPLTQEYLWTKVSSWFREGDIIITETGTSAFGIVQSRFPKNSIGISQVLWGSIGYTVGATCGAAMAAQELDPKRRVILFVGDGSLQLTVQEISTMCKWECNNTYLFVLNNDGYTIERLIHGEKAQYNDIQPWNNLQLLPLFNAKDYETKRISTVGELNDLFADKAFAVPDKIRMVEVMLPTMDAPANLVAQAKLSEKTNAEQ

SEQ ID NO: 7857 - protein, 857 aa, Candida albicans
MIRQVNKKAISNGLFKRLSLSSSAFANITANKKSSTHQLNQKTQLTNVRFYSTKSTVIQLLNNIGSKREVEQYLKYFTSVSQQQFAVIKVGGAIITQQLNELASCLAFLYHVGLYPIVLHGTGPQINELLENEGVEPEYIDGIRITNPKTMEVVRKCFLEQNLRLVTALEKIGVHARPITAGVFEAEYLDKDKYQLVGKITSVNKSPIEAAINSGYLPILTSLAETSSGQLLNVNADVAAGELAREFEPLKIVYLNEKGGIINGNTGEKVSAINLDEEYEDLLKESWVKYGTKLKIKEIHDLLQHLPRSSSVAIIDVNDLQKELFTDSGAGTLIRRGYRLINRNSLRDFGNPDLLRNALLRDPEIKTGKVSVASYLKFLDSVQFKSYGDEPLEVLAIVVEQNDKIPKLDKFLSSKTGWLNNVTDNIFNAIKKDYSQLCWVVNENDANLPWYFSKSDGSFAKNGQILFWYGLNIDEASKLIKEFDSSSIGSSLSSSKESGVFTSAQQKRGFHHSTVRRNTNPNPPLSEGKQTERKKVALIGARGYTGQNLIKLIDNHPYLDISYVSSRELEGQKLQGYNKDNIVYSNLQIEDIKRLEENNEVDVWVMALPNGVCKPFVDTIDLVQNPNSKIVDLSADYRFDTTGEWTYGLPELNDRKTIAQAKKISNPGCYATAAQVAIAPLKEYISGTPSIFGVSGYSGAGTKPSPKNDVNLLSNNLIPYSLTDHVHEKEISSQLGLQVAFTPHVAQWFQGITHTINIPIKKGSLTSREIRNIYQDRYQGEKLITISGEAPLVKDISGKHGVVVGGFAVNSNEDRVVIVATIDNLLKGAATQCLQNINLSQEFGEYDGIPTESLIRG

SEQ ID NO: 7858 - protein, 1262 aa, Candida albicans
MRRFNRNIRDDLTRVKADNRLVNELETMEWMNSFLDKFWVIYMPALSETVMFQANEILKDQAPGFGIDALSLDEFTLGSKAPRVDSIKSYSKTGQDLIEMDWAFSFAPNDTDDMTKNEIKRKIDPKVALGVTVGKAFVSKTLPILVEDMSFTGRMKVRMRLSANFPHVKMVSVQFLEAPEIDYALKPVGGDTFGIDIMSFIPGLSKFVNTIIHATLRPMFYAPNWFDVDVEEIMAAQSNDSIGVVEVTVKRCRKLKTGNPTKPKSLNPYVQIKVTNNGKIDERTKTKKLVNDPVFMETKTILVNSLEGNFLNFNVYNLIEDKMDDQLIGNCEFGLGELLQEETIQGITKNIMEGGKVVGKIELDIKYFPTIQPTILEDGSKEVITDNEVGIMKLTLHEARDLDISKSVIGLLNPYAEIYVNNEKAKTCRRLRQTNEPGWNESFESLIKQQSETSIQVLVRDSVNSDIVANLEVNLQDVIFESQRGQHWFTCPPISKNGPAPKIRLTTSWKPLAIDEATSEKVVRNAPIGGMRLHLRGAKGLKNLESVGYVDPYVRVMLNGKLRAKTVTFAETVNPQWNSVYFLPVANEHQHYLLQIMDAEPEGKDRSLGTAAINVADILRKNEEGYYLGYDGSDEIIEQPVLFNTKEAGSIFYSVSFFPAIPTYSLSQLHNFETYQKELKEQEEREKERYARDEKMFKENPDEFEWIEIENEQMKVPPKVELKLQDAIKYRAGNMIVHLKGGQFEKPDVYVHTLFDEHAYPSGISPISEGKKLTTASVGETFIRDLPNSNLIFRVAKVAEVTKSSEVIVEKMYNTLDIYEKSFEKPIKLNLGNRNTIEVQLEFIPSTVKLAPLDTILDVGKIKLEIIGGENLRSVDSNGKSDPLCTVNLDGVEIYKTDKKRKTLDPIWNESVEFPMISRSRQVLLVEVYDWDYTHDDELLGVANIDLSNIPALTTTPFSVDLDTQGKVNLRATFFPEYIRPPLDAKSAIPIDLGAVSDVGMKAVGGAASLATGAVGGGIGAASDQLNKGAGFLKSFKSKRGRNSKDKNNNDDSSSLAPSAISQSKSSVSDDGGHNLKPDIPEEEKELREEQGEEIESIQAAPNIREQDLPKPQQPFVPHGNVRGHQRNVSNATDVSSFAASIHGADALPGRLTIVEARNFKAGDNLEVKASLKTSTKDKSLFKTRGTKFDNVSDSYKWGESVPFKSSPSGNIILQLREHHTFGKSVVLGEATLNLENYVNVSENITLPVGSGELVVNVKYFT

SEQ ID NO: 7859 - protein, 370 aa, Candida albicans
MNSDSISQVFEYLNKRDECPTDNDYNGNIGTRISSIFVIMVTSAIGTLLPLLSSKYSFIRLPPMVYFICKYFGSGVIVATAFIHLLEPAADSLGNECLTGPITEYPWAFGICLMTLFFLFFFELLAYQGIDRKIAKESQLDNQGPHTHSHFGDASMYVKKDDEEEDLENQNEKQADANPYPSHFAHAQEHQDPDVMGTTVNDQSKEQYYGQLLGVFVLEFGVMFHSVFIGLALAVSGDEFKSLYIVLVFHQMFEGLGLGTRIATTNWARHRYTPWILAICYTLCTPIAIAVGLGVRKSYPPGSRRALITNGVFDSISAGILLYTGIVELMAHEFLYSGEFKGPGGFKNMLLAYFVMCWGAGLMALLGKWA

SEQ ID NO: 7860 - protein, 745 aa, Candida albicans
MNFIKKFIGTTTTDEVASIPSGKLYLTRSKQSPKGAIECLYNDAFASIKKTTSPYYYQLCITKVYQEGEADFNRFDDSEEEYDGEESAPTNDTRRQSKDEWIFPIADELKIHVCEKEDGSRAIAWKDVNGDLGDKFEFVIDEEVRGSEVEAFGMTIYKCLFENKYQTSYAKVNDPNQLKEFIYNPKGELLTFDELKDLNDLEEYETDEYEDCETSPIDAPKGETKYASTDVDLHLYDTRTGTFILHLAKPDFELKLIDLGNWEYTLYIHGETTRINTTLSKNMNPTFNYQHLSFIFNDYTVDEGGINACSWLVKFPDYNDMSKFQTVFLGLMYETLNRRKWGETEEHDYFVDAFSRVSIGDAKDLESEEEEESEEENEGDGPVKWETEKNEKNSSLTVGYAKDRSYVVRGDKIGVFSEDDAGQLNFQTAIINVADLKGKHFSPEKMLLHQQDQYMIISNPQFDDKALYKMDLTRGKIVEEWEVSKDVPVKSYAPTSKFAQLTDEQTLTGISSNGLFTIDPRLSGTKLVNDKTYKAYKTTNNQFQTLATTDKGYIALGSGKGDIRLFDRLGANAKTALPSLGDPIIGIDVSKDGRWLLATCKTYLLLIDNKISDGQKNAGKLGFTNYFDKDKKPTPRRLALKPEHEAYMVRENGGKQLSFTPAYFNTGRDSKETTIVTSLGKYVVTWSMGKVLLDKENPYLVKRYTQNVIADNFKFGSNNEVIMALQDDVSMVSRRSLANPKNVFK

SEQ ID NO: 7861 - protein, 306 aa, Candida albicans
MIQNTVRGSILRSAKFTAPRSLLSISRSLTTENTSSKPTPPPKNDETTHFGFKTVNKDDKEKLVGGVFSSVASNYDVMNDVMSMGVHRLWKHHFIQRLDAGMRPGSTQPLEFLDVAGGTGDIAFGLLDHAEKKYGDTMSKMTIADINPDMLKEGEVRFAKTKWANTDRVNFLVQNGETMDQIPDNSKDVYTIAFGIRNFTDIQAGLNTAYRVLKPGGIFACLEFSQVENPLLDYAYQAYSFSLLPLMGQLIANDRDSYQYLVESIRKFPKQEEFKGMIEKAGFYVPEPGYENLTFGVASIHIGVKI

SEQ ID NO: 7862 - protein, 589 aa, Candida albicans
MSFVKSCRGCLRTFATSTIKHEKKLNKYSSIVTGDPSQGASQAMLYATGFSDEDFDRAQIGVGSVWWSGNPCNMHLMELNNRCSESVNKAGLKAMQFNSIGVSDGITNGTEGMKYSLQSREIIADSFETMTMAQLYDGNIAIPSCDKNMPGVLMAMGRHNRPAIMVYGGTILPGSPTCGTQNPAVADKIDIISAFQSYGQYLSKQINNEERIDIVKHACPGPGACGGMYTANTMASASEVLGLTLPFSSSSPAVSKEKAEECANVGFALKNLLELDLKPRDIVTKKSFENAIAYIIATGGSTNAVLHLIAIASSFDITITVDDFQRISDNTPLLADFKPSGKYVMADLQNVGGTPAVMKYLIKEGIIDGTQLSVTGKTINENLAKLADLPEGQDIVRPVSNPLKPSGHLQILKGTLAPGSAVAKITGKEGTYFKGKARVFNDEGAFIVALENGEIKKGEKTVCVIRYEGPKGGPGMPEMLKPSSALMGYGLGKDVALLTDGRFSGGSHGFLIGHIVPEAAEGGPIALVEDGDIIVIDADNNKIDLLVEPDVLTERRKHWTPPEPRYKRGTLAKYAKLVSDASKGCVTDL

SEQ ID NO: 7863 - protein, 449 aa, Candida albicans
MPRIKNQVEKEEQLIEEPKHERDNEYKDEQGVEPQEEEQDDDNDDDDEQLAEEDSEIGPARKRGRKRKITTVVEDEDNNTTKIRKKVKSEDDEGQAANENEEEDDDDDEEEEEADEEDDDDGETEGDGKKKRGRKKKPKVQLYGDDVFDDEGNPLIIENDEVVIPQEDPKGKEKIDELGYLQGDRKFRMKTFKLLGKGDRLYMISTEPARLVGFRDSYLLFKTHRTLFKKVADNDEKMDLIQRGIIPNSYKGRAVNLVTARSIFREFGSRMIENGKKVIDDFWEQRAIDNGDIPGELADPDQLYKTKLSNVLGDSGIVSTGHATPLTATPIVNYQGDPTWMYQIAKQTSEYNKKLYELRTNNMYKGYKDTYTNLTLYPQSTQPTQIKYSKFNNNNGKLVYDIVMTNKNIRKPITGLAKVPQAILNEIDDPEIKQAIIDQQEYEISAREI

SEQ ID NO: 7864 - protein, 518 aa, Candida albicans
MSDYPPPNYPPPNHPQYQQQQDETYHVRPDMERQQDFGYYEKPTPSQNFDDSFKVEKPKFNDWPFAIFFWLVVAGFIAVAGITLNALRSTYGFQGGSIYGSGNTFTLNTNTIILFAFIIVMAFILSAAIIVFARLAPKAFIVTGVILNVVLGIGTAIFYFVEKYYSAAIVFLIFALFGAWCYWSSRHRIPLSATILTIVIDVMKMYPSTLIASFIGLIFSAAFSALFSIVIVATYVKYDPNSNNEACSVGGGSCSKGKLIGVLVFVFFAGYYISEVIRNVIHVVIAGIYGTWYYLANSDQGAPKHPALSSLKRALTYCFGSITFGSLIVSLIQLLRQFISILRSNFAADGNGWGVCGMIILDFFVGFIDWLVRYLNKYAYCYVALYGKSYIKSAKDTFDLIRFKGMDALINDMFINTALNLYSLFVAYLVALLAYLYLKFTKPEYNSGGAFYAPVIAFAFLIAGQINRISLTVIESGTATFFVALAKDPEIFQMTNRNRFDDIFRNYPQVLEKITSDH

SEQ ID NO: 7865 - protein, 520 aa, Candida albicans
MTTDRSSKRHVLMIDNYDSFTWNLYQYLHQSPKCGKVDVYRNDKITISQIENEIKPDIIFISPGPGHPLTDSGISRDIIKYFSGKIPIFGVCMGQECIFDVFGGDVSYAGEIVHGKTTTIKHDGKGMFENVPQSVAVTRYHSLAGSSKSLPDVLEVTAVTETQPEVIMGVRHKKYTIEGVQFHPESILTESGQLMIDNLLGVYGGTWEENDAIKTGKSIKINNKNGGENILQKIYKQREIDYESIEKLPGKSFENLQIELDLDLAPPLINFYDRLKYTRSNLKETIILSEFKRASPSKGDININAHPANQALTYSTNGCSTISVLTEPHWFKGSLDDLTLIRKVIDKPTTKDYKRPAVLRKEFIFNKYQILESRLAGADTVLLIVKMLNDETLLHELYQYSLKLGMIPLVEVNNSDELSEALKLTHKGTTEDPLIIGVNNRNLTTFDVDLNTTSNLVKQAKTSDRKGDVLVLALSGISSVDDVKKYKYEDNVDGFLIGESLMRAEEKGEAGKFLHDLCTC

SEQ ID NO: 7866 - protein, 1177 aa, Candida albicans
MNMQPSVSVNSPLSTMSNGSISSDIMPPIPKQPIPKKSQQIRTDKPRPHVCTICTRAFARLEHLKRHERAHTNEKPYQCAACGRCFARRDLVLRHQQKLHTDLPHVIRRGSSKDGEINEHINVLHNNTNANAPLPDGTCPAAALDNEKPVFRTSLFENNPTAGSPHGPTSSIIIDDDANSMSNSPRPSITLHSSHHRDSVSFGPSNTPPTTASTVLGMPAQPTPTTTTAATANQIEAKQGSRSNSRVKSQHQQQQQPTPDSPQLKKFKPSASPMGNTSGIPSHLSNNYRHASYSAASGPCYSSFKEADFFGISGQVEFATPQFGPQNEDFGKLLESNGLLDWDSIDHLDLNDEGKLAMKQKSIKNLHDFFTDNLKVSSMNHSQSSDVRLHNDMNHKTITQSVPQQPQQQPPIKHSSASDITPTLIPGSQQEQQQQQQQQHSPPNSHSNSVSSKASINPQHLNQTKKAEEPNQNDWFRDLVFPPFDLNIPFSAHASSEDLKGFFGPTSLLADTNDNYRKQLNHQQQQQQQQQQMNGNYNHKPNVTAKSNGNEIPSALRTHINSVADFSVEYPTSFFLEDATLITEELRNKILAMSNIEDKDLPSLSDLKRYFQLYEYGFNKYFPFIHLPSLKNSKNHNLETVPLLLAIAAIGALYAYHDNDPLILFNLSKFHIQNFFEKEITLNNLHFKKVPIMAHQCLVLHIFISLFLNEPNMVDITSRQIKSMIGLIKSTNFNEPLEKLIIPPQPAIPGSAGDKSLIQKNFDYFIMAQSRIRTLHVFYFLQAFRSAFGGVPILFSFNMLKSGSFCTNEKLWWCEGSSKWYNLVGQTYPSKWSLIDVSNGAGIDVLVSFLNDPTNVNTPISYNNLLVLLFTIHERIIKAVDNVQPFTHLRWLEKKRPLQALIMNWEVLFHQNHGSSKIITSTRGSLSAKHELKLILPMLALVKMKLEVRLNFAVSSVLQRNWVAMNSDLDRLVYRERKYNVLTTSLPHCRDILELWMHNMETINYDVRETARRTPAFFCCTLFISVILIATYLSHIEKNCLEREITNQELECWFDCQELFSKLETVLSVSIRSSYSEDLTKDFRNKFSDETKVVKKLRELIFQRESCDDALSEGIDVENNQSKLVQINQEIKKGLTESKISMKSIYLGIRILADVPVWPLAMVFAEALKSRAKYIEK

SEQ ID NO: 7867 - protein, 421 aa, Candida albicans
MNGTEDKPVIKSFLDTDLYKLFMHAAVNKQFPDVPVKYRYTNRTPQLKLNSQAISWLKKQIEYLGDLRFSAEEILYLHRVLPQLPSDYLEYLADFKLVPSSQIKYLDNDEGDFELEIVGKWNDTILYEIPLLALVSEAYFKFVDTDWNYEGQYALAQKKAKQLISNECNFSEFGTRRRRSYESQEIVIKAIKDVQIDTQSKYIAGTSNVYFAMKYDLPPIGTVAHEWYMGIASITQDYVHANKLAMDYWIDTFGAKYAGLALTDTFGTDNYLTMFVAPYVNEYSGVRQDSGDPELYAEKIARHYEKMGIAKNTKIICFSDSLNVEKCLKYKNTADKLGLISTFGIGTFFTNDFNKLSNGEKSQPMNIVIKIKEANGKPAIKISDNIGKNMGDQATVDRVKQELGYTERTWSEGDETHRWSK

SEQ ID NO: 7868 - protein, 337 aa, Candida albicans
MLIGISGTLSSGKTEVARYLTFQGFKLISFKQEGHESDATTPEEDEVSHQITDLTVDADYKMEVFKHFDDLSALDNYVTVNWQDNFVISHIQDMNMLKALQKRPFFLHISIDAPVYLRYQRSKSKNNFTLEQFVDKNDQLLFNVANPLIEINNQAQVKIINTSTSIKDLFIKLSELNLLNGSRLRPTWDSYFMRLADLAALRSNCMKRRVGCVIVRENRVVATGYNGTPRHLTNCNEGGCSRCNKGQGSGASLATCLCLHAEENALLEAGRDRIRGESVLYCNTCPCLTCSIKIVQSGIREVVYAQSYSMDLQSHKVMSEANIILRQFHPPKDGIFI

SEQ ID NO: 7869 - protein, 586 aa, Candida albicans
MSRALSSTRVLVNDTLLPATIIFSVESGTILEIVDRVLPPNDPILARYNVFPIDYRNVTPAVIMPGLVDAHVHLNEPGRTEWEGFETGTKAAASGGVTTVIDMPLNAIPPTTTVANFNLKINAAKGQTWVDVGFWGGLIPDNLYDLKPLIRMGVRGFKAFLIESGVDEFPAITPAHILAAMKEVKDEKTMLMFHAEMQPREKEEFSDSADTLTAEIDDFDLGMSASFIDRAPTPVVRLLSNDPGDHHHEHENCRLPHNHAGSINPSVLSDKQAKALAHTPILAGAEPTFGKNARKVNTHHSRSYSYTEEDTKVNTPLLLAQQENAELANIDPTAYATFLASRPDNFETTAIAEIINCSTLLPTVPLHIVHLATHEAVPLLRAAKAKGLPVTAETCFHYLSLCAERIGSCSTHFKCCPPIRTDDNRKLLWKALRNDVITTVVSDHSPCTPDLKGMEKGDFFEAWGGISSVGFGLPILYTEGLKLDPPISLAEINKWCSWNTAKQVGLSHCKGTIRVGYDADLLIFDTDAKYVVENKETYFKNKLTAYDGMEFRGRVLETLVRGNTVFAMGRGFSGPKGKLILEPRFE

SEQ ID NO: 7870 - protein, 865 aa, Candida albicans
MIDNIINNLQIILQQNDDNFTSPHDDVIYRPHSARVARYQVIIASTLGLTALLLFSILRLKYPKIYVANFNHLNFSLHSTSRRNLPELPSNSLFGWIPTVYKITEQEILEHAGLDAVVFLEFFKMCIRIISICLVFAIIIISPIRYKFTGRVDEDYPDDDSDNDDDDGSNNNGTTIIKHIVSAGISVASKNNDGEQYQQFLWLYTIFTYVFTFVTVYFLFKQTNRIISMRQKYLGSQNSVTDRTVKISGIPGSLRDEVALARHIDRLNIGEVDSVLIVKEWQNLNKLFKRRRRIVRKLEESWVEYFEKNGITNKSDLISLHPQVGESYRFSNRYTDDAEESPDWGSQNSNSAQASIIDQDSESVEGDSSDTLNRLLNDESRTRPSLRKGWFGLFGPKVDSINYYTDKLEVIDKEITRARTREYPATSTAFLTMKTVAEAQMLAQAVLDPKVNHLITNLAPAPHDIRWDNLSLTRQDRNTKILAVTIFIGIMSLLLVYPVRFMASFLNTKSISKIWPSLGKAIESHKWAETLITGLLPTYLFTILNIVIPFFYVWISEKQGYLSHSDEELSSVSKNFFYIFVNLFLVFTTFGTASFVDTTKIAFDLARSLRDLSMFYVDLIILQGLGIFPFKLLLVGNLLRFLVNSLFRCKTPRDYLNLYKPPVFNFGLQLPQPILIFIITLVYSVMSSKILTAGLLYFIIGYFVSKYQLLYACVHPPHSTGKVWPIIFRRIILGLFLFQITMVGTLALQDAITCATFLAPLPFLTLYFWWSFHKQYIPLSTFIALRAIESNENINPTDLEQIIENNNNKTLDERRELNTKYEYPNLVNDLDGPMIALDGEDVLIVNRDGTTVRKPPQYFSSEWDY

SEQ ID NO: 7871 - protein, 345 aa, Candida albicans
MSGETVFVTGATGYIAQHIIKQLLSKGYSVIGSVRSQSKGEQLKELITAHHQDTTGDAKFDYVIVESLIEPGAFDSILQNHKEVGVFIHSASPIPFATDSVEKDILQPAIDGTKNVLTSIKKYGNENIKKLVITSSIAAVEPLGTGQTEPKTISEKDWNPITFEQGLANPAVAYYASKTLAEREVWKFVDENKNQLNFDVAVINPSFVFGPQAFGIKDKSAALRSTGEIINSVLKLKSNDPIPSLVASFIDVRDVARAHIIAFEDDDAIGQRLILDNEIFTKELIAHLIKKNFPSLDIPEGDIVKSEEEIANYPWRVDSTKTEKILGFKYISLDKSVVDTVNQLI

SEQ ID NO: 7872 - protein, 446 aa, Candida albicans
MSFRKRGEIIGGSPAPNRGPIGSIPARAPGIAGRAPPLGRTPPAVTGKGITTTTTSSFQLKSKPKSIEKDNATQIMQNPGVRPSLVTSQPTTSTGSSDLDKILLHQGLPLGNSLLIEESGTTDFSSVLLRAFASQGILHNRISNDINAHVIVLGMNQQWANDLPGVYKGSSKEQKKAKIIENESKVSVSNLSNAPSTTNRTTTDPNLKIAWRYGLNKKPESKDENESSNSYEHYNNQFDLTQKLVPGPNPQDISFLPLNAEFNNMVNQISSIIKNQLRSNPTKVIRLIIPSILNPSLYHPSCSSSTFIVPFIHSLRSLVRRFSNNLVLVCSISLDLYPKDSSLLLFIQSLFDAIIHLQPFNQEMTQLLEKAYKNEPTKIQQGLVNIIKIPILSEKGLMMVHDGEYAFKNGRKKFEIEEWSIPVEDDSKDDTHQTQEGGTTTKNIDF

SEQ ID NO: 7873 - protein, 422 aa, Candida albicans
MFRDRTNLFLSYRRTIPRDSFPTRRTRFSDLNNEEENEGLILSSTIGNQSNRKSKNKSNLKQGVNDFDNDDYEDNIELKPMIPNIFDIAKELDSYLNIINKDIEELNSMYKKLIIINKLNKLKLEKQIEEINYQILIKFEKCYVLIKKFEYLSNNHQRLKLNYNQQDLEILINFKKNYAVKIQDKSLIFRNLQNNYMKFLKNDEEEKEEEEEDILNMNDEQATLLNEGNDSKSTTPRTTTTTTTTTTTNFTNQQQQQQQQQVQVQLQLQHQQGNNNIQYLQQREREISKLAHGIIEISTIFKEMESMVIEQGTILDRIDYNLVNTVQDLKQADKELIKAHHYQKRSTKCKIIFFLSLCVFALLMIFILRPTKTTSPSNNSNSNSNSNSGNPGNPENNNDQEPTRPNIDKPANEVNPPPVNKA

SEQ ID NO: 7874 - protein, 517 aa, Candida albicans
MPTSPTESIPNSSTKEQPILPKMLPTAKSPHTTPAQSPQNSDHHHHHQQTPPQPTDGQQCSNCGTTKTPLWRRAPDGTLICNACGLYYRSNNTHRPVNLKRPPNTIAVVKEEEGSCKGDGRCNGTGGSAACKGCPAYNNRIVAKKALEKSPKNDSSRAPIDKSLKRSTSTDATTEDESSLAIACFNCGTTITPLWRRDDAGNTICNACGLFYRLHGSHRPIKMKRPTIKRRKRNVSDKKSKDEVQMHSSDQSPIVASDPISPTPHNNETNNNVTNITTTTKTPTRSPHYYQPPPQYPYQHRPINSTTSSAINRLPPISYQSPYQTAPLSHSPMQSSSSYSPGASSVIPSSYYPPYSGSGRIPNGPGPVPGPPPPPPPTQSQPHHQQITTSPTSQSYGSLRAPIHITKRGYTPENIRLPSIQLTSSTSSNSETKLPPITNHSEKCCSNCAGPKSLAPMAIDFTASYRFNNIDSQTKLTKEDQNDSEGVSRDNDTRDENKPIKQEEHRSALSIGKLLNG

SEQ ID NO: 7875 - protein, 428 aa, Candida albicans
MVLFEVKGWDLKNNNKIKVGGLPEKKNKNKNKNKNKREPKQIDNGSNITNNETNAKPSKSDKDNSNPKKDKKRKHENEEQQPAEDQHKSSNKQSKKQKKTNRTDSNEIKNQSSDQSLTNSFISSNKKLTPLQQKMMAKLSGSRFRWINEQLYTISSEEALKLVKDTPSLFDEYHQGFNQQVASWPENPVDVFVDQIKTRGKNRPVNAPGGLPGLQNKQVVIADMGCGEAQLSLDVTNFVNNYNKPQKKNKKYFKGLDIKVHSFDLKKQNDRITVADIKNVPLPDESCSIVIFCLSLMGTNFLDFIKEAWRILIPRGEIWIAEIKSRFSESSEIRNQNEELIGEEFVNSLKAFGLFHKSTDNSNKMFTRFEFFKPPPDILRERQLKLEKKKKKFIEDDDDRTDIEKLESKRSEKAEGEWLLKPCIYKRR

SEQ ID NO: 7876 - protein, 688 aa, Candida albicans
MYYRARHSLPYQKRMENLTWRMMYINNKSIFTNTNNAPKEIFEQSLDPEIDDFDYVAHIKKIGQFNQQKTQQQQDHLQSNLDNHNSIFADNTGFSNNNDRGSSGGGMTSISSLSKKRPAPFSPMIQPEKTTIIPTATNTMSQLSQQLNEFNKFNHPSQTSNFNDVNHHMEISTSHIAPTSSAFEFSLDPLAFEGPNQNFQPEPHHDFNTNSFDSMTSSYERPLFDDFLPRDHHNIQSSSVPTSASSFSTIVPKNTQFSTSASITSPTSTFSNQGNNSSNFHRLNSTVSITATPGNLLRQESMVSLPDYANHLRSMSQTPTMNSSNAPFSHSFNDGGSYFMNNFTGITLPSQPSPQPIHFDNKPKDDHFNTSLSVSQQQPSAKKSKRKSTITKSKKKAASPETTITSTGSTITTKSTNSNSTGKGTATGPAASNTGVSCTNCGTKTTPLWRRNPQGQPLCNACGLFLKLHGVVRPLSLKTDVIKKRQRGNNNGSGNSSGTTNNSNNYNNKSISKKNEIDDGDDLNPTSITNNTGLTNNNNSKSPAKSKKKSNFDNNSNSALNNLDKSKLKINTNEITNISETTSNSSSPVINLNHGGRSSGVFGNTPDYLNGITSPAVSLVKSEIDNPHQLNNSNSNGMLMTMHQSSHQSSLSTTFDHEVESNNEGSNSSGVNTSTANNQDWDWLNMNY

SEQ ID NO: 7877 - protein, 861 aa, Candida albicans
MSSITVEQYDYQTLTKSYMDIFNSQKFAQFLNTTQTGFAHSSSGIEFSVLMKTLFTSLCFCTIQLTLFCLLRPVFNYLYQPRCFCVPINERMETLPREFFKWIVPTLKCSINTYLSLGLDAYFFIRFISVLSLFFLFIGTLNMVILIPINYTGSSTEYTAFGLDKLSLSNIATTNVSRLNAHFLMGLITIGFFHWLIVYEFQSYVIIRQSYLLSQPHKDSVMAKTLLISNVPPYLQNHEVLKTIFQVVPGGIKDIWDINEFEIIDHQVEIAQDALHYLEKSQVLGLKKYYHKKAQWCGSSVGDSVEEIKEFIETHEIYFYPPLYSGPIRIPQIERTIRITLPGWLRIFCFQKPIPMYEWSLQTLSECNQKIDEEKLKLAEGQLAKHSKIFIEFTSQEGSYIAHQCLLSQSQGFLDKTTIEINPNDIIWRNVCRNDGIACKFEKYLVTIAFISIIILYVIPVSLIGLVSQIPLLTQLLPFLEWIYQFPEEARETIAGFLPSILLGVLTEIVMIIFRFLTYFKGRTTGCEVEIDLQKWYFAFLFVQQFLVVTISSSVTVILKQIIDQPTSIPVLLATNLPKSATFFFQYISLRAFAFCGNNFLRISPLIQSLIVCKFIDITPRQKFNRITNLPKIKWGTTFAVYSIYACIGISYSIISPLISIFIIFFLNLSILYYKYALKYVYSHINESETTGRLYPTALLHLYTGVYCLECCLIGVFFLSKNDKGGYPMRVQGWIMTGILILTIFANTIIYNRYIPHFSNLPILSDKTFKDGAKPISESSSPNTDDTCYSNHKLLYLHPAFKYESPKIWLPKDPHGYTDLSLQKMSDRSQFEGENDGAQVQLGKFFSSLKLMISEAPPDYK

SEQ ID NO: 7878 - protein, 466 aa, Candida albicans
MNKEISEEPSIEPQVQGNESIEETRSEHNYSTRSKERKREEELQKKSQLKQKQHNVVIHPRLKPVPFKNSDLNPASLPEPNAATTINEIEFFQTEDLPLNKRGFKYKHCRPNPEFPSNLYSTTDVPPYHVCASLFDRSSGILFSNDLKSITTAQGWRSSRTNVCIREGSYYFEFKILNSNEKSHVRIGVGRKEASLEAPVGFDGYSYGLRDVDGQFMTISRRQKLCIENGFKTGDVIGFLIQLPSLEEHRRALEEFVAEKSQLKPEQKLKKRKKKKIENDIKDNVKFIEHGNILRDQIPIKYKNALYYEQYEYTTTKTMEHLLNPVTVFGEKAIIEMDDKRKNIPVIPNSKIRLFKNGVEQEPITDLYSFLPTNIEDHEDINLGPNTKQQQNPNYRNTDDGTLGYYPMLSAFQFGVVNLNAGPNFEFPPSDPVKPLSDRYNEQVVEQYYWDLVDEVEAEYLDSFDL

SEQ ID NO: 7879 - protein, 605 aa, Candida albicans
MKPIALLLVLFTSLSLADMNMDSHSDMMSGSHHNEDVDSLESMPTSTENTDNINSTESLVPIPHVMKHMHGVPILQTKLLPQERLFWENYNTTTYFTVESAHRPALYLHIAVGLFSVFVFYPISLIFNNLNMGKSYMTMLLIHSSCIVFSLLNYSIFINSIPDLYPGNAYNSMVIILFVTTILQLIFAFIKNIEPGESDGNKYFQLNNQHMRANSSDEESLQSMISPPSTDDVIPSEKPSSFKMSNFYDKVMKFRTWVAQTKFHKISKIGFNLLNWGHFFYFLILIPTGVATFCCYGKGNTVFNLLAHFIKGGVFFAYGLLSLSRYCGGFTNKGWAWNHKFIDRTKKQSFWFSLQNKGLWTMEMIESSLILFYGSTNIFLEHLANAGGEWSPKDLQHASIAFIFIGCGLCGVITEIKLQDWRYEQAMADMEKYQYQGEEQNQQELQSNTNNNNNTIIKASPGFSPNPFPIVTIYWTGILMSKHQQASSLSTEVHVQWGNMFVLGCAFRFITYLMLMLNAKVPKDLSRPSRPFTELVVSFSLLCGGLIFMESTDPVILSFEYYGLTSMFTLNISLGFTTLFMGWQMLLFAFKDWLKSKYNKQQDMV

SEQ ID NO: 7880 - protein, 759 aa, Candida albicans
MDYPSGSDPFTSRQHLLHHTFSPLISIEATHNVDLIFQSIINNNDNISTLQIFKPYGNNAKYSINTNNQQFKIINNQLITKNYPSFPIRFEPSLPDLVSVLNAQSRNPKNSNNLGGSNNTSNNNNNGLLLNKLNSNSSPSLSNSITEEFKTRSEGVPLNQLFSISSLEVYLRHMANPDNSINNSGGGGSLYLNFFDKLITSNQISPFETFNHPISQIFIIDYETDSIDILRKLIVEFRNYNFPKFFQIDDLLIHVFIIYDCDKFATGDIINFQNEIKNKLNVNTTVFPMSYNNNKEKSSGGGMETNTISLVENSTIEEELQRISWNDINNSFEIPKVVDYTIRTKLYEFINKFLIPHMQSKVRYWDDQILQPKKSITGRFFQVSKKFFNSNNNSDTSLLTNTAKSFKNGVTHGNSNSNSNSTFNYNENYYYKSSSEQILRKLADWSLMLKDFKYAYSTYELIKKDYSNDRAWVYVASTQEMCIVSLLLVQTQQQQSPLQLQSQSQLHQQNIKSLIPDKNTLRKIKHDIIEPYMDNLCYTFKSRLNLKTFSFKTMIIVIELLLCMSQMFNISYWWYDTIEKYLIKLNNEFDQHLSNINNSNNDNNSNAFSIIKALLYERLGYNSGHSVFLSLENYHLFRKNFERNRQVQPQPQKQEREEEQEEEEEEGMYVNELKLSTPTNRGIIGTTRFRKSALWYLLSMKQWHLSNNKSQIERLFNNIQLVYPDTNSNTNKQNGEEYVWYNRNDGILGILEKYIDTDK

SEQ ID NO: 7881 - protein, 399 aa, Candida albicans
MLSILSIAALLIATVQAADFSSSCPIDSPISCSSNGDTSNSCCYENPGGIILFTQFWDYNPASGPADSFTIHSIWNDYCSGGYPQFCDTSLEIDSTGSTIESIVVDQFGDQTLYDNMNKYWTDINGNNKKFWAHEFNKHGTCLNTLNPSCYSNYKQNENVYDYYSLVYQLFQKLPTYQWLVSAGIKPSTTATYTLSQIQSALKSKFGAEVYIACDSNNAINEVWYFYNIKGSILQQNYLPIDTVSKTNCPSSGIKFPPKGNSGANTLTTKTTGTTTSGSGSTSVPATSYINLTGKSGCLISNGKYYTSGTCATYHFNTGSSGNTQITSSKGNCGIDSSNQFTCSSSTSATDFQVSGGSIGYNGNFDWCLGAVTGSGSTAQTSVKLSDGSCSSFKLTLSS

SEQ ID NO: 7882 - protein, 519 aa, Candida albicans
MSSLDYPEDFENNNPFAEPVISDQVNGVHSQTENNETQLPEGEPTAPQSGEPSPDPNSESILTEDELRKLIPERFTTKYSLSIQLVEIEKNKPGNPILKMNVKVKGLPRYRQSIYKDVRRTFNEVVKFNRYLIVSNLEVFVPVIPSAITSYPTGGEDERKKLFVEWQEWLDRITSNPILIRDEEFVYFVENDFGYSVINTNRKTSVASGIMRKTLKQFAVPYDPYEELANFRPIIKEAYLTFQKLHKLLDRNSKTEKQLSIHIYDMANKLNQLSEFETTHPGMKNMWEKLGKITQKQSDFTLVDSINEMATLGDGTQILIDDFYEIKEALTNRHLIMRELIQAETQTNAKHVQANKIKNKSSLDPIKVDEALRSLEYASKVQESLHLQVKRISGEMMFERKEVIDFTEKKIQRLMKGYTLHKVEHHRKILKHFENIRLDVRSVDDKGGLSRLNRDNLTNLKHNLTQSQSSQGDSWSSRTFRSLEKEEEENENKKSDVNGFESATVDARNAASLLGVATF

SEQ ID NO: 7883 - protein, 462 aa, Candida albicans
MSKVEASSGTNKNPVSTATSTVGESATATTETSTELRANFAEVTDPKLNAKPQSSPLLSSTPPSVSKALVNSYPYLIIINKLLSITTWTNDDYWVNVVIISLYALVVLYFENLVIWSGHLILVAILISYALLNNKIIKEANLHPTLDDVVQALTSTCVKADILLSPITSLSLTAYDIKRLIFTTLFLTPVYLVVTFLLIKPRTILLLTGVYLLTYHSSYSIVTRRILWKLKIVRLIFFYLTGLDLSETKNHSLFAAAFAKVSSSGTSSKSNKPVRFTYVIYENQRKWLGIGWTSNLLSYERTPWTDEFLNESSSIDSFKLPNAADDATNGDSNMQGATWRWVDKTWRLDLTNDGAITLSSSKRSKTTANPTNDEGFIYYDNTWKKPSTEDTFSKYTRRRRWIRTAELIFDNKQEEALESSENVKATGVSVQDATTTKKVKSLRFAEDESNVEESADTDKKND

SEQ ID NO: 7884 - protein, 414 aa, Candida albicans
MNNQTDLFSNVGESTVNNSSRRRKRGANKNELQLTYESDSSDDQEGNSDNENNISKLQQQQQSEEDILGDNKENDMFDSDKEDDMFTNDNEEEDDDMFASDNEESDPQKNNLDDEEEEEEEEEIKETDESVNNYYNNIEDLNFDSFQNKKKEPKFEAFNLKEETNMGKFDNEGNYIPNEQKDSSDADDDDLWLEDYNNKSEINKAKQAQLLRERQQREKSKSKSMEKDHNVEPLEVLLSDLILLLEPVESPMEALARLNPKNLRKKKKKGDDDDNNKNGIANHEELINKITNVCSILINDKQIDDIYELTREELTRKFQTITGQSFNVERGLKRSREESDDEDDENSQINNIDYGEKIWEFRWIGDENEDKVINGPYSSYEMNHWKETYFENKVEVRKIGETKFQNIEYINEFT

SEQ ID NO: 7885 - protein, 224 aa, Candida albicans
MSSSTFSQTRSQALSLEKQTEQLLSKFSQFQQQQQQNQSQSLDITPEETIIRQQIEEIFQKRNAVISKLNRISEVEPNLSTSKLQQLTRHKEKLNDDNLSFTKIINNIEDERNKNNLLFNVHRDINHHKQQRNIDGNAYILEESERVNNVNSIADRLLQGAFATRDELLNQRQYLNNAQSQVLSTMQNIPGLNVLISKINTRRKRDTLILASVIAICILFLFFV

SEQ ID NO: 7886 - protein, 421 aa, Candida albicans
MSNPIVPFGKQFRAKYFTNMDDEVFPVNHGSYGLTPTPVLEKYLDLIVKNASYTDKFMKYGIKDSYVESLKAVGRVLNCDYHNLAFVDNATSGVNTILRSYPLKKGDKLVIQSTVYGACGNTVKFLHDRYGVEFIVVDLNYPITDEEILSKFERVFVEEKPKLCMFDTISSMPGVVFPYEKMTKLCKKYSVLSLIDGAHGIGCIPQDLGNLKPDFYVTNLHKWFYIPFGCAVLYIDPKHHNVVHTLPISHSYLEDHVKLSDGDQKNRLIDRFFLYGTKNFASIQVIPEAIKFRSEVCDGETKIYDYCHGLAKQVGELVSRKWGTSYLDQKGSTLISTMVTVEVPTQDYPEIVKNWSVIDHHVYNKMFDRKAYTPCIAHNGKLFARFSCQVYNELSDYDYASDVVLETLKEVASEQYKKHKL

SEQ ID NO: 7887 - protein, 453 aa, Candida albicans
MSEILNYLSSWTPTSTPTSTTLSSIATSHVSKLSQTVASVISQATTETDWYNLRSLSQAYRGAQASLTIISAEKVLATATDSQVQSRATQAIFEATLNLKDLSMEQNIYGYELNRAANIIYLVVYAIIFGYTLLMCIKSKYWWYNVTFVCGYGLEFVGFLGRVLSFNDTSNMSHYIMQSVALTIAPAFIMAGVYFLFGQLVVIHGRQYSVLKPMWYSYFFITADVVSLLIQAAGGGIASVASSNHKDSSVGTNIMIAGIAAQVVAMTIFLVFWFEFLNRLYFKNSRSDLIVDCPYGRRSISNYFKLLLNVKSVRGHRHTHLEKYYNEKFASIRQIPLFDYMVLAMTIAVIVVYIRCVYRVAELAEGWGGYLFTHEPYLMILDAAMIAIAGLIFIPFHPVWVFGKNNIVKLATIKKNLDENEKNQDVEYNDDVESQERSSSVVANDIHCLNSKL

SEQ ID NO: 7888 - protein, 364 aa, Candida albicans
MNFFRKKTEEDRDSSSSSLPRDDTASVSSKATSTSTNTTSKVELVKCYIPFEQPVNPIKAPDFELDKEQIEKYEKLVAYFEDYISKEIPVNDQHNATTHPLIEDELAWLTKECFLRYLRATKWKVDAAIKRIEDTIIWRRTFGVANIPNHTDPKKLITADLVSDENETGKQLIVGYDNDNRPCLYLRNGYQNTAPSLKQVQHLVFMLERVIHFMPPGQDSLALLIDFKAAPAELNLSSKFPSLSTSKQCLHILQSHYPERLGRGLFTNIPWIGYTFLKVVGPFIDPHTRSKTIYDQPFENFVPKEQLDKEFNGILDFEYIHDTYWPKMNEIADRKRANYMENFRRLGSKIGLSEYDLRLEQAAL

SEQ ID NO: 7889 - protein, 289 aa, Candida albicans
MSSSLLLLSRTIKHNSIPIKKPLFTFTPTSTSTSRSISISTSSTCNIIRYYHSQDHININTIDNNNKIDDQILTTAIKYIPEYGFQSQCITKAIKELKYPDSMNSLFTFKKSESNQSLELQLMIHWLKLQRYNLEKYIEKNPTPGSSSSSSTSYEDRLIELINVRLSYNKPILNQLKTTGISQLILPYNLTQGLNELYLLSDDLAFYSGDESNDFSWYSKRLSIASIYVSSELFMLNDNTKDFELTQRFIKQRVYDLKKLSDGYNNIEQWLGFNGISFINLIKSQLTRG

SEQ ID NO: 7890 - protein, 622 aa, Candida albicans
MRRAVSKILPTPKLFNDSAHFHSNFRLEYNSVDDFYVQLDNPHKVWLPGEEISGQVVLISKKNLANIVITLSLVGFIKINASSHSKLRPLKHTLFDYTIKIYGKDEEEQTDSAEFSNGLLKGEHVFPFIVKLPNKRVYTSIDFGKGSINYILKAAIGNSSSYVIPASPDNASTSSLTKKKILQNPSHTSEKVISLVNPIDVSLLPRPKPKRLILKDPRTSSNKKLSRTQTSTSTINTMSSNEHDHSLPEGATPEDSDHKSLKSIPVPTIKAILEVPQRGYLRGESIPIKLSINHLRKIQDFNGIIITFVRVCRLDNGPDGVVESFRKDLQQLILPLYVDPVTFQSEINSSLRVPADAFPTILGCPLVSFQYFVEVLINLSGKSIALDSDVDARAKANPQATKSSSDKFKFNFDSTQTERSTYINTDSYKRSKKFLQLTTEIYIGTHRSSTQEEQAPQAEEVASRRSSSMASNSNSSPAVFSTSSPHSPVEHQYAGAINSIPESVAVSNFTPPYENVVPSYVPPEFVSHLQNQSELSEKERMRQHESSLLPSAPPDDEQPSPVNMTSNQQPFSFFTYQNTNTSPPVPLDDDLYQEPVDSAPNYLNVNNDRLIVPQDNNSNSET

SEQ ID NO: 7891 - protein, 579 aa, Candida albicans
MQKVFQRWVSRIPPVKLQYKNMLRDPSKKYSPPKQINLPNRTWPTKVITKAPRWLSTDLRDGNQSLPDPMSVPEKKEYFHKLIDIGFKEIEVSFPSASQTDFDFTRYAVENAPDDVTIQVLTQSREPLIRRTVESVKGAKRATIHTYLATSDVFREVVFGMSKQDAIDKAIETTKLVRSLTKDDPNMQDTEWNLEFSPECFSDTPVEFAVEICEAVKKAWEPTVENPMIFNLPATVEVAGPNVYADQIEYFCQNITEREKIIVSTHTHNDRGCGVAATELGMLAGADRVEGCVFGNGERTGNVDLVTVALNLYTQGIAPNLDFSDIESIIEVSERCNKIPVPARSPYGGSLVVCAFSGSHQDAIKKGFAKQKGDKWAIPYLPLDPKDIGRTYEAVIRVNSQSGKGGAAWVILRSLGLDLPRHLQVAFSGLVQNTADSLGRELKVDEIVNLFNEQYLVSAPLSIQDFEITKNKNDEREIVAQLNDGITIKGQGNGPISAFIDAISNKFGVLFEVVNYQEHSLGGGSSSKAATYIELSYVNANGEKVTRWGCGINHDVSQASIEAILSVVNSLIKKNELTV

SEQ ID NO: 7892 - protein, 492 aa, Candida albicans
MSNMNYQFPPSSPLLEDYSYNSSKDPFTSVASAKSKVAEEAAEARVSRDNYPTPNPSSSLFRSSSPAREAYGDNDVFRPEPKQTANINKDFNVLNPDKSVMRIPLVNTHTHFSIGRSSRSCEFALTASDPRISRVHLKLSSSSQQIILTCLGSNGVGVIIPKPCFVYETNSPDNFIIMENTTGKPLDAHLHNYKLNKTIKLDGNHTEFFVRKGETITMPKFENILLQISKDIILLNPNDIDEDLTDEETPTLLIENDNTNTNNTTPMNKTVSLTLPKTPLKPKPKSIIKVAENNNEEPDETPSKEQRSVENRTFLLFEDKNIPSRSTSTSPKPPAVLADKTNIKRKATSEEPQIKKKKKQIKRQQTPELDNSVLALPNLAEIQNILINHLAFSRLSSTPASFLNTISVSTSKLSLAQIRAILHDLKCIGVIHRQGKDAAGQPLQEEYYYMPENDEDRERTTLVSNIKGHGGLRSCRKTHKQYYWKKPAPIKK

SEQ ID NO: 7893 - protein, 359 aa, Candida albicans
MSKSVNVAIIGSGVVGSSYLSQLNNLKSNIAFNVIYLAKTSEEALYSKDYSPVDLSTYETAPTQPTLSLDDLVKFIKGAKKPTVLVDNTSSPAIANYYPTFIKEGISIATPNKKAFSSDLKEWKEILQTAELPGAGLVYHECTVGAALPIISPLKDLIATGDKVDKIEGIFSGTLSYIFNEFSKTEKSDVKFSDVVKKAKELGYTEPDPRDDLNGLDVARKVTILARISGLEVEGPTSFPVESLIPKELECVESVAEFMEKLPNYDADIQKVKDEAFAENKVLRFVGKVDLNTNKVSVEIGKYGFDHPFASLKGSDNVVSIKTGRYPNPLIVQGAGAGAEITAHGVLADTIKIAERIAN

SEQ ID NO: 7894 - protein, 373 aa, Candida albicans
MSFQEIPIIDLQEAFDPATRSKFLEEVRDAIINVGFLLLKNYESLGPTEEDLQSIKQQAIEFFALPAKEKLQCEMLNSPHFLGYTRLANEITASHTDWREQIDLATELPAPKEGEPLYKNIEGPNLWPNPEVIPKFRPTIERFIEKMTALSNVFKDLVAESIGVDPKALNRYFKENQQCKMKLIAYPDVSELDGTKSAALDDTPETNQGVEPHRDSDLITYIYQATEHQNSLQVQNFQGHWITVPNIPGHLVVNNGQTLQAITGGVAKATIHRVLVPEKGTGTRISIPFFQTIDLDSSKGVVDNLPQEVIDLKNERDKKIKDWGVDTGFQFEPDVSKEPIGHAVFRNRIKSHQDVAKKWYPDVLKSVLQEYTH

SEQ ID NO: 7895 - protein, 576 aa, Candida albicans
MSRKSSIDMPKEASSPECYTTSTSSNEISEKPGMWRNFKDSFKPPVPIDDIENGSISSTQLKGGQNVPLQQSLKKRQLQMIALGGCVGSGLLVASGAALRNGPASLLIAWFIVSTFLYCTMQCLAELSSTFPVSGSFAVYSIKFIDPSWGTAMGYNYALFWVVVMPLELVASSMTIKFWPSNINTSVWVAVFYVLIIGTNLFGGTRAFGETEFVASVIKLLGIVGFNILAIVLICGGGDQGYIGGKNWHPPFTTGVKGVISVLLTATYSLAGTELVGLTSAEAAGDARKVLPKAIKQVLWRILIFYLLTLTLVGFLVPASDPQLIGGGSGASASPFVIAIREGGIKGLPSVFNVVVLVALLAIANSAVYGFSRTILALAEQGVAPSIFKYVDRQGRPLAGIATSAIVGLLSFVSASKQQEQVFDWLVALSGLSTFFTWGSINAAHIRFRIAMKVQGRSLDELPYKANTGVLGAYYGLIMNVAVLALQFWLAVWPIGGKPDATYFFKQYLAAVLVLAVYVIHKVATRNWKFMVDYKDMDLDSGRSDIDIDILKQELEEEREAYKRQPWYYKFYQFWC

SEQ ID NO: 7896 - protein, 318 aa, Candida albicans
MHTHHSHSGDYVSHAVDTLNDMVELYYKKGFQIICLTEHMPRLDNKYLYPEEIDKSYTIDNLNGDFTRYLNHARDLQLKYATKDKSSSGNMKIIIGFEVEGINIDHINYSQELLNKVQMSVGSVHFVNEIPIDFNKELWLKARESTKSKTTRELYNDYFELQYKVITQLKPTVVGHFDLIRLLQPEDDIDPTTGKLTKDVNLEIDWPDIWQLVIRNIKFVKSYGGLFELNSSALRKGWDTPYPKRDIANAIIEYGDSRFCLSDDAHSLSQVGIFYSKAWEYVESLGMENIYHLDLDDNGEVVISSKKIQELNNSLFWK

SEQ ID NO: 7897 - protein, 371 aa, Candida albicans
MASICAAPHCGKETESALKCPVCLKEGVSSVFCNQICFRSSWAIHKGIHKAEDGSEDYNPFPNFEFTGELRPHYPLTPRRAVPKHIKLPDYAQDGKPISEIKNDRIGKIPVLTPKEIEKIRKVTKIAREVLDITASNVKPGITTDELDAILHKECVKRNAYPSPLNYYNFPKSLCTSINEVICHGIPDKTKLQDGDIINLDVTIYYLGFHADLNETYYVGDKAKCNPELVNLVETTRECLDLAIKHVKPGIAFRELGNIIEKHASENNCSVVRTYCGHGCGALFHCQPNIPHYAKNKAIGIAKPGQVFTIEPMLNVGTYKDLSWPDKWTAVTQDGKCSAQFEHMLLVTEDGCEVLSARTETSPGGPGPRIK

SEQ ID NO: 7898 - protein, 584 aa, Candida albicans
MYRYNKVLDATLIALVSFHLVISPFTKVEESFNIQAIHDILKFGIFPLETIDNYDHKQFPGVVPRTFLGSLVVAGLAKPILLLSSAFGFEIEGYELQKLVRAVLGLVNVLMLIRLRDSINKITFSDKKSKRKGLIGFWYTTLLLSQFHLLYYSSRTLPNFIALPLVNFSLSKIIQGDLSGLTWLAFTGIVFRLEVGLFGLIIAIVSSLGFGQSNIFGNIIYLAMGTLLGGFTSFCIDSYFWGRPLIPEIDSFIFNIVQGKSTEWGTEPWDTYFKKYLFQLFRPPVILMLAIPGLINDPANDGTKFGDKKSVPHPARYSLRILFISSILFIAAMSFQPHKEWRFIVYTIPIFTLQAANGVTNICQKWGLSVLNKVLIFIIGANVIISSLLSLHMGYISSFNYPGGDALQFTNNYILENYKNETVSVHMDVPACMTGITRFGELDGKFASYDKSEQDFDITNYDIIITHNEVPNWELLHSSRVFDGISLRMFIQIFMAQRKDRSTIFNITKLILSEFAQGEFGTVHDMLRSTITTVEYLNVYKNVNKNPHMVQGVPETKIIDQEIDPEEIRQDVNEQIDKFESAVL

SEQ ID NO: 7899 - protein, 550 aa, Candida albicans
MPYTPIDIQKEEADFQKEVAEIKKWWSEPRWRKTKRIYSAEDIAKKRGTLKINHPSSQQADKLFKLLEKHDADKTVSFTFGALDPIHVAQMAKYLDSIYVSGWQCSSTASTSNEPSPDLADYPMDTVPNKVEHLWFAQLFHDRKQREERLTLSKEERAKTPYIDFLRPIIADADTGHGGITAIIKLTKMFIERGAAGIHIEDQAPGTKKCGHMAGKVLVPVQEHINRLVAIRASADIFGSNLLAVARTDSEAATLITSTIDHRDHYFIIGATNPEAGDLAALMAEAESKGIYGNELAAIESEWTKKAGLKLFHEAVIDEIKNGNYSNKDALIKKFTDKVNPLSHTSHKEAKKLAKELTGKDIYFNWDVARAREGYYRYQGGTQCAVMRGRAFAPYADLIWMESALPDYAQAKEFADGVKAAVPDQWLAYNLSPSFNWNKAMPADEQETYIKRLGKLGYVWQFITLAGLHTTALAVDDFSNQYSQIGMKAYGQTVQQPEIEKGVEVVKHQKWSGATYIDGLLKMVSGGVTSTAAMGQGVTEDQFKESKAKA

SEQ ID NO: 7900 - protein, 946 aa, Candida albicans
MPSNPSFNWSKLQNVYYNIRTCYDEMDWSIDNLYSNYLVSLSPNTTLIAIASKSAPHPNLIEIYSNSGHKLWSVVYNSTHNDYIQSFHFTSDEDLIIVLNNGRYRHYYDLIGSFNEYNFVEDLVTMDNISQRHNTGDKIDANPDNTRIITNLENNQTEEIIKIIEVKTWNQFLVVRLESKIIVSDLDSFTNYAISLASYSASDFECFSIQAKTGTKKAVTIQLGYRKSILSIDVDFDLASYEILDQELTDGPFSSIAISPSGQLISLFNQQLKKIFVISNKFDQILLDYDTSNESSDPYQVEWCGNDAIVLSFKDEIKLIGPGQQSISFFYDIEDDDEFDLDNLMVRKDNKNTDYKKFDDLLFTIPILQTSIDGLKIVTTNKVQFLSRVPETSVEMYQVGSTAPSSILADCIDKFSANASKADSNISLLRADNTLLKAMEDCLQVALDEFSPDWQRRALKAVSFGKVYYDDYFDSDKFVSVVDIIKVLNLIRSPELGLFLTYQQIEKIGGWEEVIKMLLRRNHHDLSLDIIDKLNLGNAKPLVYIHWCCYKIRKELDMSDIDLFKLVSEKLISSTKTRVNYISTEQISETAHEEGREELCKFLLDLEPSVIKKIGKLLDFDETELALIKSFQNGNYDLSTLILLYLQDNLTTSQFFKILSQTESVLKKENSTKQTIQKLDIDVKSEYMQVTGEVVGHAWEESIAKNVSPRLLETYLKHEDRVNELNIFKIQQFKRDPELHKDNYYESYKSVLTKAINRSTNQRISKALQREIQVLELQKKLSETYLTDFYQEKTLMAILKRMIAMNQIKPAKKIVANFQLSVEKFWYLVLNTLMDRREFDQLYEFAFGSSDQTSGNSPIGFEPFAELGLQKNAPQSHISTYIKNSNKYKYEEKISMFIKNDDYESAALEAFRNKDIDILKSLLQKIPNSNQADIQVVNSYIQQLGY

SEQ ID NO: 7901 - protein, 428 aa, Candida albicans
MSFDINWNQLTIDDTINQSIKEFLDQQFKNISLPSFISNLAVTDFNLGEIPPEVTIRHIGDPFEEFYEDENNLGVMNEANNDSKDEHLKNHGDGINKDSGYNSQNLDDEDEDDEDDDEDDEDEEEEDEDDYDDHDLGTINEGISLLNFNENSTTPSANSFAGSAAPPLPPPLNPSRDSFHSILHPYGVNSIIGATGAGSETPTNILNQNYLSSRVLPKISVKQKQPHHDDNDIQLIVEINYKGDMHINLLVNLLVNYPSPNFISLPIKLHITDIVIHSIATIAYLKKSVFLSFLCDVDDTFPDFDSNVQTPTSTTGGNFVDYYSNDATINKERIDIVKKIKIESEIGEVENNILRNVGKVEKFLVEQLRNILRDEIAWPSWICIDMNDDDDEEEEEEESEDNDGGNSDLNDNDGKHGDGRTDETEAGE

SEQ ID NO: 7902 - protein, 319 aa, Candida albicans
MLSRTVLRTLKPLNIVSITPRCQLLRFNSSKSTPNNNNNSNNSNPGQLDINDEIFKKYSQQLQKKARELGIPLNELRIKFQDKIEKVKLELGGIDPTEELKQFFEHEKQKKQQNQNDNDDGTIKIRGIKDRDAPKLPYKVLDNYINLSKAKELPRDDIIKIWTARFINNDRALHAILTHLQFAQLYTNAFKYPQFVLPLPKPQQDGYELEFVQWQFVGPNTINCMFTTLAEYKLHGEYASPHTTLTFHLELAQDKDLVLMNGFNNKESGISMDEAHLLVVMLQRFYSGKNPQMTQLLHEFNKGNAEFDIDALIKQATSV

SEQ ID NO: 7903 - protein, 544 aa, Candida albicans
MRLNSVALLSLVATALAAKAPFKIDFEVRRGESKDDLSPEDDSNPRFVKRDGSLDMTLTNKQTFYMATLKIGSNEDENRVLVDTGSSDLWVMSHDLKCVSAPNSKRNERSFGHGTGVKLNERELMQKRKNLYQPSRTIETDEEKEASEKIHNKLFGFGSIYSTVYITEGPGAYSTFSPFVGTEGGSGGSGGSNTCTSYGSFNTENSDTFKKNNTNDFEIQYADDTSAIGIWGYDDVTISNVTVKDLSFAIANETSSDVGVLGIGLPGLEVTTQYGYTYQNLPLKLKADGIIAKSLYSLYLNTADAKAGSILFGAIDHAKYQGDLVTVKMMRTYSQISYPVRIQVPVSKIDVESSSGSTTNILSSTTGVVLDTGSTLSYVFSDTLQSLGKALNGQYSNSVGAYVVNCNLADSSRTVDIEFGGNKTIKVPISDLVLQASKSTCILGVMQQSSSSSYMLFGDNILRSAYIVYDLDDYEVSLAQVSYTNKESIEVIGASGITNSSGSGTTSSSGTSTSTSTRHSAGSIISNPVYGLLLSLLISYYVLV

SEQ ID NO: 7904 - protein, 834 aa, Candida albicans
MPLDNTIQGSTIGGPTAISKGKKSRNGCLTCKKKRLKCDETKPNCLNCTKKNIECGGYATKFKWKSFNEEKSHTSSSTKSLKRHLELASFSVTGKSIEEVNKENELIAKGINPETVKNSTINRSRTNSISTVNTQRTKSFDRSHSIPIPSNEHAQLQSASVYKSDLNSLADAAMKQIGKTPASMSSTPPALKAHHQHPAQSLPGDSAISHMMVSQPPQPPPPFTPNFEAMLTTEKPTIKRNGFGNFDSEINLTPSLSAILNFAFNHEEVEVPSVETLSPLTLNHEARVDASMTNNKPITEQEQILHLFNEHTSGIMSIKNGVHENPWRNLIAPLATKYPCLFNSIAAMTSFHMAGSNNVVHSPEDLRTKGWYYMKKCIFELANGLSNNVKDLPLDVALVTCLNLAVCEQWDTHTSSGIAHLKGAKSMIQQILELLKEQQQFIKQKKFENIDSISSVDEDQELLMNLKKKLVLVDDLDYEEMIHETIKCPEKSVVIPKSIQFILNNWIYFEVLAQMTSDSMCDDKGVDLVAAITSMSQNKLNKDKDRNPKSPSEASDSSDKTFRFFETLNLLNYNNEVIDPLLGCSQSLFVIMGKVANLITKIRKAKHKSQSKKRNTLTTISQASELKQELVNWKPSVVASIMDNEISNESSTTWDLPSCIATAEAYKYSTLLYLHQAVPEIPSFSAHALAEKIFILLASIPTSSNLSIVHIFPLLVASSEAEPGEEREWCENRWKLLSQRMWIGNIDRALEVVKEVWRRKDGLQETCEDRKFHQLGGLMVALNGDPNNNSNGGSGGNGHSNGNSASNTVDANTIDSKTHWSTVMKEWGWEVLLG

SEQ ID NO: 7905 - protein, 456 aa, Candida albicans
MVGLSRVLNAGFILSGQSVFQDVAAPHQASIEQYNIVKYLGGSGPYIQNSGYGISTDIPEKCTIEQVQMISRHGERFPSKGDGKYFNSVMEVFKRYGEFHGDLSFLNDYEYFVTNPDYYEKETTPKNSKGPYFGTTNLLRHGAYFRKRYQSLFDQKEKLVVFTSNSGRCYQSGVYFARGFLGDDYSEDTVEFVVVDEDKKMGGNSLTPRYACKTLNQDLHKDLVNQYDKTYLDDILSRWLVDNPGLDLSADQVSSLFLWCAFEINVRGYSPFCNLFTKDEFIRSGYRNDVGNYYQTGPGNNMTKVIGSPMVEASLKMLQEDSKIWLTFTHDTDIEMYLTSLGLIVPPGDLPVDRVPFPNPYNAAEFFPQGARTYTEKLKCGEKQYVRFIVNDAVYPYPDCSGGPGFTCELNDFIKLVKSRLHDVDYKLQCEVDGPAELTFYWDYKDRKYNAPLIDQ

SEQ ID NO: 7906 - protein, 452 aa, Candida albicans
MSLPEPYYNDDKSSFAYPTVRKRWPTIIDGAIEDVQQTIENHQEEASIGHKIIQQLLNTKEDFVNDAIVRPFTDEEITINPHLKHYNESLENLNKIKPVTWQTGPWLYLECYLYQYINNFFIVNTNEFWNHYDVFQNLKDKTFKQSELGVLELCKRYETLSKQLDQANDEVLHLLFKEFIDISLWGNATDLSLLAGNVTLEDIKSVQGAEVRKKNEEKILVNDLSQAWKQLHNDGNDSGTKRVDIVLDNSGFELFADLILTLFLLDSKLVQEVHLHCKEIPWFVSDTMPKDFQDLLNQLVDPEFYPQIHSDEPSSIKLVHDKIQHYYDNHALIINHDPFWTLDYNYWYIPKFDSLYSELQHSNLIIFKGDLNYRKLTGDLQWPKTTPFKTAIQELSTSNLPVLSLRTCKADVVVGLPEGVNEKLIKEYENMGNENGQLWSSSGKWAVISFNK

SEQ ID NO: 7907 - protein, 521 aa, Candida albicans
MSTTKPTTSHVESDTKPDADHLEIRKSNLSESDLGVEEISDLKYINLPPSLQHMTQEELRTLDKKTTRKIDLRLMPMLIFIYILNYLDRNNLASARLGGLEKDIGLVGNQYQICISILFVGYILFQVPSNMLLNKMGRPSIYLSVVMTIWGAISTATGAVQSFGGLVAVRVLLGVVESAFFPGALMILSSWYDKKTLASRNSILYAGSLISSAFSGLIAAGILKMDGLGGVQGWRYLFIIEGGITVLTVPFAYFILPDNPSNTKFLSQEEKDIIMWKMKRDLGNVNDSDKEAQESEIQGFMHACKDIKVWLLCAIHSFLVAACGVTNFFPSVVQTLNFDRTTTLCLTAPPYVIAVVATYLWAKHADHSGERFYHVTIPLVLSLVAFIISAASLNTGARYFSMCLMIPSLYCAFVVILTWISNCCPRPPAKRAAAIAIVNCLSNSTSIWNAYLYPSSDAPRYLVAFCCNSAFIVLSILFAVGLRIRLTVLNKRIERGTMDWQKELGKGNDGSKISPDFRFLY

SEQ ID NO: 7908 - protein, 592 aa, Candida albicans
MDEELQKHLEISRNTKYQWIACIFSLVIFLANGIVFYWIPRLLRDKRFVKTNRFKPYFAFVDIWQTINTPFSIKVGKKTHYFKPSLLALGACFILLNGKLCYIETDDLDYKPRIFIIGKRCARIALGQMPAMFLSVTKGDFITALTGLTYERAAFFHAWFATLMFSMMTAHVGIIGFYWAHPNYDIAPKYPKNVYGIIGYACFVFLVFGNVALIRRYAFEFLMVNHRVHSFIMLLMAFLHNDRAKAMVILAIHLLVLDKVLGRIYGIVHSLKSPTKGLSEFEILDDETLRVSIPVKTSKTDPTPWYRLFLFKYGTWLAGSHVYLNVRKVDFFQHHPFAVASLPESGKITLVIKKRNGFTKKLYDKVKTMRDEQLDSETSETDPNIVKLKAAFRGPSSGKFQPLITFDSVAFLAQDYGASFVLPLCLDLLQTIEKKEVAKNYLGRPAHPYLKVYWSVKRLNNIYWYEDLVRKLLPFINSGKLTMNVFVQESVELEATKSVSTKKLDIVSVTSDPSSITNSEIKFIYEEPMEVSQVIQSHISSMHFPEEKAFKSLAIMSCGNDNFGSQVESESQKYRWVKDAPNIYFYNESYET

SEQ ID NO: 7909 - protein, 382 aa, Candida albicans
MLSFTLRRAMSFTTRILKVRPESIQFVNDKPQISDNETLINLEIAAKELTTTHNAIGFPTETVYGLAGSALSDESVKSIYKAKNRPADNPLIVHISSIEQLKRKLINYEIPQVYLDLISHFWPGPLTILLPITKDSPISKLVTANQDTFAVRMPNHPVARALIAMSDTPIAAPSANASTRPSPTLAEHVYHDLNGKIPLILDGGACNVGVESTVIDGLVDPPMLLRPGGVSLEDIKRVGGKLWENIVVAKKTAGKLEPVKTPGMKYRHYSPTAKVVLFVNCGDGINAIENYLTNNKVDASTTKIALLKSKHFGEDHPHFIIKRLGTTGNEISHNLFKYLREVDEEDKVELIFVEGIDETNEGLAVMNRLSKAAMEVVNGGEA

SEQ ID NO: 7910 - protein, 368 aa, Candida albicans
MVHYRNRYLNYIRRKPLALLAPITLLVVIYFYFFSAHGFSSNKQKYNYNKKSRGWFYKNRDTVILKDLPKNHISHYDLNKLTASKDALNKREEVLILTPMSKFLPEYWENINKLTYDHSLISLGFIFPRTTQGDDALKELENALKKTKREKRLNFKKITILRQDSNSLQSQLEKDRHAFKVQKERRSMMALARNSLVFSTILPSTSWVLWLDADIVETPVTLIQDLTGHNKPVVSANVHQRFINQDTKQPDIRPYDFNNWVESEEGLKLAASLPDDEIIVEGYSEMVTHRALMAHFYDPKGDPSTEMTLDGVGGGAVMVKADVHRDGAMFPSFPFYHLIETEGFAKMAKRLGYEVYGLPNYLVFHYNE

SEQ ID NO: 7911 - protein, 432 aa, Candida albicans
MTVTIPLTETNLFKPISIGDVKLNHRIVHAPTSRKRSTKDNYPTDFMIDYYKSRSQYPGSFIIFESCLVSERSGLVPHKIGLWDEKHCLALKQIVDQVHNNNCVISCQIMANGRTSNAKLMQSKNLPILAPSITYPNEAAEKLATELNFPIKPLTVDEIHNIQDDFVNAAVNSLKIADFDFVELHATSGFLIEQFLSPLSNKRTDEYGGDLVNRCRFLIEIIDKFINHPDIGPKKFGVRISPWYSHNGMVYPEEVNLEDGIPYQFCQYILKQLEVRKSQGNEIAYVSIVEPRVSGNSDVDSFGDKSNDEIIKSWSGKLIRAGGYATNFNVENPTLIKTNKQVTNEGGEIVHYANLINDVNNDDRTLIGFSRPFTSNPDLVYRLENNLKLEYYDRPTFYTQTGEGYLTFKNYDGSAVTKLPEKELMREGISLQ

SEQ ID NO: 7912 - protein, 553 aa, Candida albicans
MAPPTAVESSINFGGHPTIKSTQDPLVQKLSLNTDTVIRHNAPPPTLYEDGLLEKGTTISSTGALMAYSGNKTGRSPKDKRIVDESTSSHNIWWGPVNKQVDELTWKISRSRALDYLRTREKLFVVDAYAGWDPRYRIKVRIICARAYHALFMTNMLIRPTEEELKNFGEPDFTIYNAGQFPANIHTKGMTSATSVEINFKDMEMVILGTEYAGEMKKGIFTVMFYLMPIKHKVLTLHSSCNQGVEKGDVTLFFGLSGTGKTTLSADPQRKLIGDDEHCWSDNGVFNIEGGCYAKCLDLSAEKEPEIFNSIKFGAILENVVYDPITKVVDYEDSSITENTRCAYPIDFIPSAKIPCLADTHPTNIILLTCDASGVLPPVSKLTNAQVMYHFISGYTSKMAGTEEGVTEPQATFSACFGQPFLVLHPMKYAQQLSDKISEHNANAWLLNTGWVGSSVAQGGKRCPLKYTRAILDAIHSGELSKVEYEKVPVFNLNVPTSCPGVPSEILNPTKAWTQGTDSFNKEIKSLATKFAENFKTYADQATAEVKAAGPEA

SEQ ID NO: 7913 - protein, 616 aa, Candida albicans
MNKSLVPSSSSLLNVNRILVRNVATKQLAPSLSVLSTRILKNHFTTKFKQHSIAFNKQRYFSTFSRSYQEPLNKHTQPKDELKQTITKATLLSQANSGLSRMLIHLKWPLSRNTNTTSTWDMTSAFISWLVMGNILWIILGTTTFGLTLMYSLHYLDSLVGKFSDDKETTDKLNQTKSKTSTNVMSYLIGGIISFGIGVDLNFEKGSSLPELKDGKLRFKNVGIVSHDGNNKHVKFKGTVEAMDITLSFNKWYEGNGLIYDLELYGLNGKLYKSRSPSPPVANTTKKSYRFNENIHYQYDLDHNVEEIASGSSSIIDNNYTFDHVKIHDSYLEIYEEQSSTPIKINIFSCDLPKLRGDKLVLDFFNANNASGAINDAMFTLHKRQNLDPENKNQDKLIRFKLDAIDLGEINKYDPNSKFNWIINGKAEVIADITLPEEQDDLNESITEVLTKMFTNMFQTADMSQTSEDSLLKDAISAIYHTFRKPEETAKPAENSYVMVNVKMKLYDLKASLPQVLPRTNNGIPFISLTDLRSLISFINTENQPITIKSTVIEKITDLSNIQHLGQTKMFDYIMGDAYEELTNLVRDDARRIINEKSWSNSIATQLLLLGLGAMV

SEQ ID NO: 7914 - protein, 559 aa, Candida albicans
MIPPFILLLFLIMNSSYCEPFEFDFFQNLDPSTNLTEIINNNNNNSISNNVFKVQNFDSKSSSSSSSSSSSGEGLQEFTPIRDTILQSETKYYSFSVNTKSGIGDFYELLIFLSGNICTQPSNLLENDTSLAVYYSFNSTMFTNNEIGQMQLFKDGFFQGLADLPLTETTTTTNNDTTTTTVPEKILYIAVRAPENTNRTAQWTYQIGVSQHDLVFQWDDRSWGSIVDVDDNSALIVTGNLTKLSSGNYSDLNATNSQFSLYLYSYDNKDYFQGMNNSWCAVRSGPVLVKPEEIETKFIARHGSIQQQFMVNNLNASTKYIAYIVMDFEGVEYGGAVLRPFEFETMDGTACELIYDLEFCDQVAYSVPAIGNSSLLASSIAGADNKTLTKKLYDDYAKSLYTNFSKGLQQIACDTVPEAIYSNLKSCQDCAQSYKNWLCAVTIPRCSTKNFTGYIHRNETNQRNEFLADVIQPNQDYYEVLPCVNVCQAIVRDCPANFGFLCPTKNDSIKLSYYWDVHVSDQWPSCNYLGPLKSSKSGAIKLIINWTIVVVSFTLMVVI

SEQ ID NO: 7915 - protein, 308 aa, Candida albicans
MHRTYSLRSSKAPTASQLQSPPPPPSSTKNKFFGSGGLSSTIRKAAAGATGPELSRKLSQFIKMEKNFMRAVEVTSRERKDVAKQLSAWGEDNEDDISDVTDKLGVLIYEIGELEDQYIDKYDQYRITLKSIRDIEGSVQPSRDRKQKITDEIAHLKYKDPQSPKIPVLEQELVRAEAESLVAEAQLSNITREQLKAAFNYQFDATRELAEKYALIAGYCKALLELLDDSAVTPGETRPAYDGYEASKQIIIDAENALASWTLDSAAVKPTLSLHQEYDEDELEHEHGEIDDAAQEEFNKHDENVEHQ

SEQ ID NO: 7916 - protein, 379 aa, Candida albicans
MLLSKFLIGDLTTRLFAAINVVACVGWGAVNTMSSAQLLHIVNNGTLPPWAGCLIIVVCTVLVTFFGYHVIHAYEKWAWIPNLIIFIIIIVRFAMTNKFTSKSFEGGETTAGNVLSFGGTVFGFATGWTTYSSDYVVYHPRNTNSWKIFFSIFFGLLTPLMFTLILGAACATGIAGDPEWTRLYKEDSVGGLVYAILVHDSLHGFGQFCCVVLALSTVANNVPNMYSMALSAQTVWAGFRKIPRVAWTIAGNGATLAICIAFYKFEAVMENCMNLISYYLSMYESIMCASHFIWNSGRFDGYDYERWNDKEAYPVGYAGVFGFACGVAGVVLGMNQTWYSGVIGRRIGEFGGDIGFELAIGFAFIGFNVARYFEKKYIR

SEQ ID NO: 7917 - protein, 904 aa, Candida albicans
MEDKNAATQLNLPNVQSIGSHLSIQDHEIALQQVIDNPLSIGEVATTLTESQKWFVLKRLHFDALVSLEELPPQASFIFEKIEQMTTEEAVEILEKNIEEHETDVNIPENDLVLWKELVENSHKFTKVQLQEKLGSNSSSSVEGEKTADVEKGHEIVDWDLQVRLEAVLVAYWSPYPEVRAVTFPYDDPTIPVETFRVYLIGIIWTAIGAVINQFFTERQPAITLAMAVVQVFLYPSGLLCEWFLPKWKFKIWKYTIDLNPGPYTYKEQMLATIFCGVTGGSTSYVSSNILMQKSEIFYDNKWVDFGYQVLLILSTNFLGVGFAGIMRKFAVYPTKAVWPSILPGLALNKTLLTPAKKEVINGWKISGYNFFFITFVASFLYFWIPDYLFQALSTFNWMTWIKPDNQNLAVITGSVGGLGLNPITTFDWNYFSSMLQPLQVPFFYPLNNIIGMFFAFFCIIGVWYSNYKWTGYLPINDNGLFTNTGERYSVASVVNKDSLFDNAKYQEIGPPFYSAANLVVYGAFFAIYPFHFVYEIGMNYDQMWDACTSFWRVIKDFRKSTYDGFDDPHSTMMRAYPEVPEWAYLIIVVISLVLAILCVKLYPAQTPVWGIFFALGINFVFLIPLTTIYARTGFAFGLNVLVELIVGYAIPGNGLALAFIKALGYNIDAQAQNFVNDLKQGHYAKLPPRAVYRVQLLSIFVSSFIQLGILNFQINGIKDYCKPGNTQKFTCPGGRTFFSASVLWGVIGPKKVFNGLYPVLAWCFLIGFLLAFPCIAIKKYAPRKYVKYFEPSIVIGGFLKYAPYNLSYYIPGVYVSYAFMSYIKRKYEAWWQKYTYVLSTGLNAGIAFSSIIIFFAVMYHEKDINWWGNTVMYSGVDYAMTGWLDATVDAPDGYFGPRRGNFP

SEQ ID NO: 7918 - protein, 213 aa, Candida albicans
MFNQFKSTSVFNSIFGSFRRFKHEYAPRFKEVEKAQKGRVSVRTGGSIKGNSLEFGKIGLRLKSQGIRMHANQLQAADKVLRRELRPTKSKLYTRFVCDLAVCIKGNQTRMGKGKGAFDHWASRMPTGKVLFEIDGPIHDKVARDALRKAADKLPGLYEIITPESKVRVSLTHLIDKPEPVDYVEKLNAKPTKKWANVQAYHTDPMYKQYSGR

SEQ ID NO: 7919 - protein, 535 aa, Candida albicans
MSTRDLPHSFSELSYGWVKRIRAEFTVGKSKEQLLAEDYHSTTDEDSEVVTSVKANSLWPAFASGAGLFSDGYVNNSISTVLFCLKKIYPDEITKSNAINNIASIAFVGTVVGQLGFGYISDRIARKGGMMAANVMLIFFTLMCAVGSWGVTVQGFFACLTVWRFFLGVAIGAEYPTSSVIASEFANQLPPGKRNRYFSWFTNAMIDSGFVVSAFVPFVLIWIFTEKHLRALWRVAIGLGVIPPLSLFFMRLKMKNSSSFQKLHMKNVKYRDYPWWLIVKFYWFRLTIVSLIWFIYDFSAYSFGNFNTIIIGEIIPEAPIWKQWGWSIVFNLFYIPGAFLGAISADYIGPRLTLALGVGIQGVIGIAMSACLNSLKKHIAGFVVVFGIFTTFGEFGPGDNIGLLASKTSATAIRGQYYGIAAAIGKIGAFVGTWVFPAIQSKYANNANPDLQLQVPFYISSALCLFSACLAIFFCPQVGQDAIYKEDHDFVQYLSNNGFDINMLGEGGDVREVCRESDSLEKGKRDDFQVDNNSL

SEQ ID NO: 7920 - protein, 568 aa, Candida albicans
MFEVGEKYPVESSSSSNDIESRGVQPITSLKDNKSIGMIEKDNDDLSCEQYSTCDEVKRDLKARHVSMIAIGGTIGTGLFISTGSLLHTTGPVMSLISFLFVTTLAYSVTQSLGEMTTYIPVSGSFAQFITRWVSKSCGAANGWLYWFSWAITFALELSVVGQVIQYWTDAVPLAGWISIFFVLLTTFNLFPVKYYGEVEFWIASTKVIAIVGWLIYAFCMVCGAGKTGPVGFRYWRNGYAWGDGMIVSNNGKYAISFINGLINAVFTFQGTELVAVTAGEASPRAIRSAIKKVMFRILVFYVLCMLFIGLLVPYNDPKLTQDGGFTRNSPFLIAMENSGTKVLPHIFNAVIVTTIISAGNSNVYSGSRILYGLAQAGVAPKFFLKTNKGGVPYFAVLFTAAFGALGYLACSEDGNKAFTWLLNIIATAGLIAWGFISVSHVRFMNVLRKRGLSRDILPYKAFFMPYSAYYAIIIIFIVVLIQGFTVFWDFNASDFFTAYISVILFVVLWIGFHFFFYGFGKDSFKWENILIPLDDCDIDSGVRDINDAEFDVPEPKNVWERFWLLIA

SEQ ID NO: 7921 - protein, 575 aa, Candida albicans
MNSGIHTPHEIHPVVSQVHVDDMGIASILSNKNITINVDHVIDSDEAMLLAIGYRQELRREFSLWSIFAVSFSVLGLLPSIAACFDYQQLVVGMSPLPWLIAMIFITSVAYSMAEIASAFPCSAGTPYAVSQLAPKKYASFLTWFTCWTNWSCQITAAPSVSYSCACMMLALHSFTDPSFVASNAQIFGLTTGIQVLCAFMACFPTKWVARFSSAGTTCNIVFLVVVFIMILGGNKRDQIKEGISKFNSNSTAWGLDNQAEWPTGLSFLISFMGVIWAMSGYDSPFHLAEECSNAAVAAPRAIVLTSTVGGLIGFMFMIAIAYTLVDLNQISADPEGLGQPFVTYLTQIMDKNLVIGATALTIISSFFMAQNCLLASSRVTYAYARDGLFPLSGIWKKVSPKTQTPINAVIMNFIVEELLLLLIFGGDVSIGSIFSIGALAGFISFTMPTLLKITYARKTFQPGPWNLGKWSEPIGWVSVAFVGLMVPILCFPTVKGADLTPTEMNWTCLVYFGLILLTTIWFVVDARRWYVGPRTNISEEDIVYGEKTEDEGDEIPDVIDGQKVSISSTEKRYQ

SEQ ID NO: 7922 - protein, 783 aa, Candida albicans
MDKIRAVISGGEKPPVDTDNDHNTDFEADRKMPDLDIVVSKSQEFDPVTSHLVNDIMEDEYAAVHVEDDSPYPEVRAAVPSTDDPTLPQNTIRAWVIGLILTTVGCGMNMLFSFHSPSFAITTFVTSILAWPIGNFWAWIVPDWKIFGASLNPGPFNVKEHTIITIMANVSFGTGAAYATDILLAQNMFYKSNFGWGYNLLLIWSTQCIGFAFGGVLRRFVVDSPGAIWPSNLVTATFLTNMHINENHTANGWKISRLAFFVIVFVASFVWYWFPGYIFQALSYFSWITWIKPNNVIINQVFGSSSGLGMIPNNIALDWNQIAGYIGSPLIPPASVIATIFGSIVVIFWIVVPAIHYSNTWYSQYLPISSTGSFDRFQQTYNVSKIIDHKTLSFNEAEYKKYSPLFLSTTFAISYGLSFASILATITHTICFHGRDLIASLKAKEKPDVHNRLMKAYKPVPEWWYLIVFLVFFGMSIATVRAWPTEMPVWGLVFALIIAIIFLLPVAIIYAKTNIAVGLNVVTEFIVGYVLPGRPIAMMLFKTFGYITNNQAVTFVQDMKLGHYMKIDPRTLFWAQFAATIWGSLVQIAVLEWAYGAIDNLCAADQKNHYTCPNGKVFFNASIIWGVIGPQRQFSHGQIYYGLLFFFIIGAVTPVINWLILKKWPNSPVKYLHWPVFFSGTGYIPPATPYNYTSYCAVGLFFGWWIEKKWFHWWSKYNYSLSAGLDIGLAWCSLIIFLCLSLTNTDFPSWWGNDVINTTLDTQVVTNIRHILKEGEAFGPSSW

SEQ ID NO: 7923 - protein, 927 aa, Candida albicans
MAGSSIPQSSNSSVSQFLSTLIPTLVVSVVFLLAFIVIHSKQRRVYEPRAVVESLPDDLRTETAPKGPFSWLTYLLAKPRTFYIQYAGTDGYFFLRFLFEFFCVCVLGAVITWPILFPVNATNGNNNTPGSNVKGFDILTFANIKDKWRTFAHVFLSWILFGAVIFLIYRELVYYVTYRHALQTTPLYDSLLSSRTLLLTEISTEYLQDDKLRGYFPTATNIWYSRDYKKLQKQVKERTKLANKYEGTLNKVLTKAVKLRNKCLKKSKPAPEPQDDIDKYLKDGKKRPTHKLKFLIGIKVDTLDYSPEKLGELNKEITKEQTEYQTYDQLPAVFIEFPSQLEMQKAYQAIPYQPDFKGVKTVINAAPEDIIWENLQLTSMKRRIKSIIANTILTLLIIFWCIPVAVVGAISNINVLTDKVPFLKFILKMPDVIMGVITGLLPVVALAILMSLVPPFIKWMGKISGRLTIQQVESYCQSWYFAFQVVNVFLAIALGSSAAAVATQIVQNPGEALQKLSSSFPKSVNFYYSYLCLEGLTISSGVLLQIVALILSHILGRILDGTPRAKWTRWNTLGQPAYSTLYPGFQLLTVIALSYSVIAPLILGFTAIAFILFYFAYIYTMIFVLRPSTVDARGTNYVKSLFQLFTGLFLAQLWITAIFVFSKNWACVALEGVIVVVTIAARLWMKWKFLPLVDAVPISAIKYAAGDPTYSYPIHDQGLKEIKVEGKNYWEGGNQLGLGPDPKDQVLPDRIPGNGPSSYAYDQQQQQYHRGSDSSAVDTKVGHGESVDKPKSPFTDSNNNHDAEKSAGFNPVNKAIAAPTQGVSWLTSFFQPKKDTFDIIKSDMPSSYFNYIEYHSDFIRHAYDDPAVTAEEPHIWIARDPMGLSEIEKNKALKEGVQVSDENATFDDKGALIFTGPPPAYEEPIRV

SEQ ID NO: 7924 - protein, 544 aa, Candida albicans
MLLKSLFPSILAATSFVSSVAAEDLPAIEIVGNKFFYSNNGSQFYIKGIAYQQNNLDSNESFVDPLANPEHCKRDIPYLEAVDTNVIRVYALDTSQDHTECMQMLQDAGIYVIADLSQPDESINRDDPSWDLDLFERYTSVVDLFHNYTNILGFFAGNEVTNKKSNTDASAFVKAAIRDTKAYIKSKGYRSIPVGYSANDDSAIRVSLADYFACGDEDEAADFFGINMYEWCGDSSYKASGYESATNDYKNLGIPIFFSEYGCNEVRPRKFTEVATLFGDQMTPVWSGGIVYMYFEEENNYGLVSIKDNTVSTLKDYSYYSSEIKDIHPSSAKASAESASSISRTTCPTNTNNWEASTNLPPTPDKEVCECMSASLKCVVDDKVDSDDYSDLFSYICAKIDCDGINANGTTGEYGAYSPCHSKDKLSFVMNLYYEQNKESKSACDFGGSASLQSAKTASSCSAYLSSAGSSGLGTVSGTVRTDTSQSTSDSGSGSSSSSSSSSSSSSSGSSGSKSAASIVSVNLLTKIATIGISIVVGFGLITM

SEQ ID NO: 7925 - protein, 299 aa, Candida albicans
MNYLLFCLFFAFSVAAPVTVTRFVDASPTGYDWRADWVKGFPIDSSCNATQYNQLSTGLQEAQLLAEHARDHTLRFGSKSPFFRKYFGNDTASAEVVGHFENVVGADKSSILFLCDDLDDKCKNDGWAGYWRGSNHSDQTIICDLSFVTRRYLSQLCSGGYTVSKSKTNIFWAGDLLHRFWHLKSIGQLVIEHYADTYEEVLELAQENSTYAVRNSNSLIYYALDVYAYDVTIPGEGCNGDGTSYKKSDFSSFEDSDSGSDSGASSTASSSHQHTDSNPSATTDANSHCHTHADGEVHC

SEQ ID NO: 7926 - protein, 369 aa, Candida albicans
MTTSSKNALTPYLKKLVVEPPTLEPKDLSEALELIFSDIPSDIQTAAFLSCLRLRGLDQEADYIAAAVTTVLHFAKTIPPELVDSKGYIDIVGTGGDGQNTFNVSTSSAIVAAGMGLPVCKHGGKASTSSSGSGDLLKSLGVDLSHVNEVTTPEIVKKSKFCFLFAPSFHPGMGLVAHIRSQLGVPTIFNILGPLINPIPLRARVLGVYSEKLGESYAQAASILAKKNQTHEKTMVVFGEIVLDEISPIGYTKTWTIDKSGKIERNRISPKDFGLPEHDLSTVKSGTPQQNAEILSHILNQDNDEFKVKQDGNNHPLVDYILMNSAAVAVVSGIADNWVDGVALAKESIVSGAAKKALEDFQNSSKEVL

SEQ ID NO: 7927 - protein, 285 aa, Candida albicans
MIKSLITRNSTRIRGANTNLTLVRFAGHSKWQNIRHDKAKNDARKSKEATLISGRIESCVRVGGKESNARLEQLLEKAKALNVSKAVVEKAIKRGCGELTDTAQLQNVQYEFMGPGGVAIIVNALTDNKARTVSMVKNAMTYFQATLSPCSYMFDKMGEVIFLPKDNDESFDDVFEVALEIGAEDVEEFEFDDEFVPGKVHKFYRLLCDPTSINQVSNDLSAKGYKLHESTVRFLANSDSQVPFPEESSKGYLRALDNLDQINDVTDYYTNIEEEHKERIVSSIN

SEQ ID NO: 7928 - protein, 466 aa, Candida albicans
MATSKIIDYFRLKDIVNQRIVYDLPLNYTDSQSSSTIKVAITITSKYDKNLHNDKEGFEKVLLPEKPKIIVYLQGGPGFPCPVPTSNSGKTKVLLEKGYQIVYLDQRGTGLSTPLEVKTFKNLVLKEYGNFEVDSQLKFILNFRADSIIRDLEQIRKDLIGNHHKWSIMGQSYGGFCCFTYLSLFPESISEVIITGGVPPVQFKADDVYKATYQRTIERNLHYYDKYPRDQSKVVRICEYLNANKVVLPNGGTLSVERFQQLGLRFGGTGGTDGIHLIVSKFDYDLDLFGYPTYDLLNTIQQFLGFETNVIYALFQEAIYCNGNSKSNWSADRLRYASDNEKLFTLNKEQVFFTGEMVYKSMFNDYSELKPFKELAYALHDFSEWSTIYDPKVLKTITWDKVPIVAATYFDDQYVDFEITRKVKQDIIPRGNLRQFITNEYFHNGLGQDPETILSSLFDLLDREID

SEQ ID NO: 7929 - protein, 319 aa, Candida albicans
MSRKPRRHNETKSTPDNGSDGIDLFPFTTEDCMEPQKIIDLFEVCFKHVLESPDLQEHIQVVKGDLYNRDYLAAFNNDDNRFAYACRWSPARALAYSSVLASLEPIKTLLENPETVRNVLCVGGGASSELVALGSVFCRLKEYHPNSPSQLNIKLIDIADWSKVVSNLTTYMKDSWVYHSEKLNSQFICNDILTSSPESLNLESLDLITLLFTTNELFAEKRKETIKFLQLLNSNCRQGSLLLIAESAGSYSHIKIGDKNFPVQFLIDTILVGKPGSNNGSWEIISQSDSSWYRINQKEVDYPMKLENMRFFYRLYIKK

SEQ ID NO: 7930 - protein, 941 aa, Candida albicans
MFKIFSRPNNNNNSDINTPPGSPSNKVIFADSFWSWYIDSYLINDKQTHIKHTPYNITKYSDKSHDVTTLQKYFTTNKLTPIPSTTQIIAILKSPFTQGDLNKSYYLIRMFQLSSQGLFLTNSPMDKLNHPIQFLGAENWDNVMCYLDALLFAMFANLESFEPILFIPNHSEYLLNQLSALLRVYVNLLRSGNLITTDLTAKICEALMKLGFTEALSHKQQDSATLFEFLTQTLNMPLLTFKIDIKHGGKFSKHDDEKISKERILFVSIPNEEVEDELLPVEKSSISHTEKVDKKSTTTTTTTTITTATIIEKPPTHQVNDNEIKELPQVDEEDDPNQDQEEDSILLEECLEHYFNNSISVKRELERRATLSHITEGVTATNLNDDGFSSSAPPPPPSSPRVITTPMSNKYEFETIENIDDKTRLRSNSVKSDNIKVGVRQRSSTTLSFWSVGTDNKSNNDKSRRGSTSGKEVSLPAWMFLRLLPFYTDDNVITNELQSVVKTSKEFATRRPILPICLKRYRFNSGAASGTRSQKRIIIPPFIDLPQFVADDIDDNSCSFRLILESAICHRGDKIESGHFIAVVRKHTNKINETEQEANNSTWYLYDDMKKNSRVVEKTFTEIFKDEWPYMLFYRLVSNHEVSGASSINSDNNTNNNNNNNNNNNNIVVPPQGSKGNYWLSQEETSPQPLETNNNLSVKTPTKSIPISNVSPIDPKYIDIRNKYYWYFTDDDKNYFKEESIKLKDGNSSFTLSPQFRRNSQWSVNSNISFVQLDKDKDKDKEKEKEKKSSSNNNNNSSIHTITSKNSNFTKSKIEKPDNDDSITGATNTTTITKPSNLLNKENEIKSSPHSSIWKRAIKLTTSPSVKIDSTESVGELNKQISPINLDTSNNDTTTTTTTTSLPKTLRNLENNQKKHRHPFSHKKSKSKRQDDYKKEHCIMM

SEQ ID NO: 7931 - protein, 1077 aa, Candida albicans
MMSITRTSTATTTTTTASDISQMEIKESEIEPRPKSTDNNSCSCSSSSSSSLIPSNTTKSNHIHKPIARRNIPIELKDDNIDGLNPTEKENNMTKCIPNTKIDSSSSSTNSTSTPLIPSDIHRACKRSSSSSNDLIYERDRFRARLKSFNDTQSHNNQHEPPPGTTTKMESTSNSTINGINESCEICDEISVTVKTAKLNIDKNPLDNSTMFYKSLPNYYPDKEDGMITIPVKQLNLDQVLEVFKWYFNSNLPNTKDMFPWLHGFHKYNFAQRSFFLHQQQQLQQKLDNSSTNTSNTNFQDSMNHNELFTDYHLSRPDDIRFLMCINDESLPVNLHNTVKLTEILTKIDVSKSEIKEIIKKIWLNDKNGIETETETETETDSSFIELLVTDCIKLNVLPIFLNLDPERGISLRNFQIQVAKLSSCSDFIIYGIDELKIQSITRILWLAQRYERQQREIEIKESGKGNQQQQTYNIFVLKNDLTQCYEKLPPSTTIMNTIQSFAKYSKIDTSGLFYKPINQYLLNDYNLPLYEKIETAKMSSATKIYQNVWIGNFWDYQSMLNYLSENKPVETSKENLKDYYCQPSNSITTSTTTTTTTTTTTNSQLSLPQPKANWKLFIRCHSEASFPDLQDLNQLLFKYTISSHEQSDEIHHLEFPPSGSIGIGDCKKENLQSIINTCKLIYLYSSTTTKNPSSGLNSLIYCTDGYTESSLLVFCYLMYSLNISLDEAILELHLTYGRPFYIFPSDVIILKKLQPLLRKFSPTTKSSNNNNSMNRQIDWANLEILSSQEINELLLGSPKESSQQNTRLGFISPNEDEDEDEDDEDEDEQDIDNDSSSGSSDYSFNEIDWVNEVEGSIPSKILPHIYLGSLKHASCLSILNKLGIQKIISVGESLPWLNGYIFQRHNDITINQSTDGNIETYTITPKKKTNLVAHSHHITSVDTVLKVNNLEDDGIDELSQRLPQILKFINDQYEINQGQVKILIHCRVGVSRSATVVIAEIMNRLKINLPMAYLYVRVRRLNIIIQPNLRFMYELFKWEEQKKLANNERDKEVGYLREIDWFIMCREITKLNTPYL

SEQ ID NO: 7932 - protein, 323 aa, Candida albicans
MNDTFLNLSDSHCHFNPECTASDTEKFAERLNEQSKQIPDNYFHLMTTQHLDLEFMDTLLTRLENPRVLVPYFGVHPWFSHLFYIEGTPTKEEHYKNVLKPEPSNELLATLPDPISLHKHKDRFLEIINKHNLEIYGIGEIGLDKLFRVPNNGYCGNLNFPSSTENKLSACRVDINHQLDVFKFQLTLAEQLKKQVSLHCVKAHGLLFDQVKKFSNITVILHSYTGSIEQAQVWIKSLPQNRLYFSFSNWINGEKIEALKALVTALRPTQILIESDIDVDRSFIEQRQTKHFDHLDGIYKKIHEHIFIDSLQIHNNMLNSIGI

SEQ ID NO: 7933-8000 - skipped (68 entries)
